(19) United States
(12) Patent Application Publication
(10) Pub. No.: US 2023/0174603 A1
(43) Pub. Date: Jun. 8, 2023

(54) A PROTEIN COMPLEX COMPRISING AN IMMUNOCYTOKINE

(71) Applicant: PIERRE FABRE MEDICAMENT, BOULOGNE-BILLANCOURT (FR)

(72) Inventors: Peter LOWE, BELLEY (FR); Martine MALISSARD, VALSERHONE (FR); Barbara AKLA, CRUSEILLES (FR); Juliette TREPREAU, Saint Julien en Genevois (FR)

(73) Assignee: PIERRE FABRE MEDICAMENT, BOULOGNE-BILLANCOURT (FR)

(21) Appl. No.: 17/916,460

(22) PCT Filed: Apr. 1, 2021
(86) PCT No.: PCT/EP2021/058760

§ 371 Date: Sep. 30, 2022

Related U.S. Application Data
(63) Continuation of application No. 16/837,916, filed on Apr. 1, 2020.

(30) Foreign Application Priority Data
Apr. 1, 2020 (EP) 20315096.6

(51) Int. Cl. C07K 14/54; C07K 14/56; C07K 16/28; C07K 16/44

(52) U.S. Cl. CPC C07K 14/5443; C07K 14/56; C07K 16/2827; C07K 16/2863; C07K 16/44; C07K 16/2803; C07K 2317/24; C07K 2319/50; A61K 38/00

(57) ABSTRACT

The present invention relates to new immunocytokines which are useful for the treatment of cancer. These fusion proteins comprise (i) an antibody or antigen-binding fragment thereof fused to (ii) a cleavable peptide linker, and (iii) cytokine, or functional fragments thereof. Methods of treatment using these immunocytokines are also disclosed.

[0001] The invention relates to a new protein complex comprising an immunocytokine and a cofactor, and its use for treating cancer.

[0002] While therapeutic success has been achieved for various types of haematological malignancies and some solid tumours (e.g., metastatic testicular cancer), the majority of disseminated forms of solid cancer remain incurable. The therapeutic efficacy of conventional cancer therapeutics is often limited by the inability of small organic molecules to accumulate in sufficient amounts at the site of disease (see e.g., van der Veldt A A, et al. Clin Cancer Res. 19: 4163-4173, 2013).

[0003] New strategies are now developed that preferentially activate relevant immune subsets, such as T effectors, monocytes and NK cells, while limiting the activation of regulatory T cells. However, substantial side effects and unfavourable pharmacokinetic properties have been a major drawback hampering the administration of therapeutically relevant doses. Notably, cytokine immunotherapy often results in the development of severe dose-limiting side effects (Pachella et al., Pract Oncol 6:212-221, 2015). Two properties shared by most cytokines are thought to play a crucial role in the development of treatment-associated adverse effects. Firstly, cytokines are pleiotropic, meaning they are able to influence more than a single cell type. Furthermore, cytokines have a short serum half-life and, thus, need to be administered at high doses to achieve their therapeutic effects. While effectively enhancing therapeutic efficacy, high doses exacerbate pleiotropic activities that manifest as adverse effects in patients.

[0004] One approach aimed at increasing efficacy attempts to deliver cytokines to tumour sites by genetically fusing cytokines to antibodies, or antibody components such as a single chain variable fragment (scFv). Such fusion proteins, designated immunocytokines, combine the binding specificity of an antibody with the potency of cytokines such as, for example, IL-2 (Sondel & Gillies, Antibodies 1: 149-171, 2012; Skrombolas & Frelinger, Expert Rev Clin Immunol. 10(2): 207-217, 2014; Kiefer & Neri, Immunol Rev. 270(1): 178-192, 2016). Delivery of the cytokine to the tumour site is improved by the use of immunocytokines, notably for cancers with easily accessible tumours. In another instance, the immunocytokine comprises a cytokine (IL-12) joined to a specific inhibitory anti-IL-12 scFv by a MMP9-cleavage site (Skrombolas et al., J Interferon Cytokine Res. 39(4): 233-245, 2019). However, the treatment of disseminated, systemic diseases might benefit from immunocytokines that have been optimised for tumour targeting and activation at the tumour site (Sondel & Gillies, Antibodies 1: 149-171, 2012). In particular, binding of the antibody outside of the tumour may result in unwanted cytokine activity and potential side effects. This problem is all the more crucial as certain payloads have been reported to completely abrogate the tumour-targeting potential of the parental antibody in mouse models of cancer (see e.g., Hess, Doctoral Thesis, ETH Zürich, 2015).

[0005] Thus, there is still a need for an immunocytokine which can deliver and activate the cytokine safely and efficiently to the tumour site.

### FIGURE LEGENDS

[0006] FIG. 1. Fusion sites for generating immunocytokines (ICC).

[0007] FIG. 2: Deconvoluted MS spectrum of c9G4PVGLIG-IL-15 obtained after deglycosylation RP-LC separation.

[0008] FIG. 3: Deconvoluted MS spectrum of Fc/2 cG4PVGLIG-IL-15 obtained after deglycosylation, IdEs digestion and RP-LC separation.

[0009] FIG. 4. Evaluation of MMP-9/2 linkers cleavability when fused to the C-terminus of a mAb heavy chain. The GIVGPL linker reported as non-cleavable by MMP-9/2 was used as negative control for cleavage specificity.

[0010] FIG. 5. Evaluation of MMP-9/2 linkers cleavability when fused to the N-terminus of a mAb heavy chain. The GIVGPL linker reported as non-cleavable by MMP-9/2 was used as negative control for cleavage specificity. HC: Heavy Chain, LC: Light Chain, Ck: Cytokine.

[0011] FIG. 6. Evaluation of cleavability of c9G4 based immunocytokines as well as H16/L16-IL-15 and HHS76-IL-15 immunocytokines by human and murine MMP-9 and MMP-2 (HC C-term fusion, linker PVGLIG). (A) c9G4-IL-15, H16/L16-IL-15, and HHS76-IL-15; (B) c9G4-CCL4 and c9G4-IFNa. HC: Heavy Chain, LC: Light Chain, Ck: Cytokine. The NanoLuc® fusion was used as positive control for cleavage efficiency. Note 1: IL-15 and IFNa visualisation post-cleavage in impaired by the high level of glycosylation of the proteins. Sample deglycosylation prior to cleavage allows visualisation of the released cytokines, indicating the proteins are not proteolysed by MMP-9/2 (data not shown). Note 3: The partial cleavage observed for the IL-15 fusion is likely due to the heterogeneity of the tested sample (≈50% monomer by Size-Exclusion Chromatography, data not shown).

[0012] FIG. 7: Summary of the MMP-9/2 linkers cleavability evaluation.

[0013] FIG. 8: PVGLIG and GIVGPL linker stability in presence of MMP-9 activity in 50 mM Tris pH7.5, 150 mM NaCl, 20 mM CaCl2)) buffer: LC/MS fragment profile of anti-PDL1-PVGLIG-NanoLuc® (A) and anti-PDL1-GIVGPL-NanoLuc® (B) antibodies obtained after immunoprecipitation and reduction and reverse phase separation

[0014] FIG. 9: Analysis of ICC cleavage in mouse serum: LC/MS profile of anti-PDL1-PVGLIG-NanoLuc® fragments obtained after immunoprecipitation, reduction and reverse phase separation at T0 (A) and T24 (B) without MMP-9 spiking, at T0 (C) and T24 (D) with MMP-9 spiking.

[0015] FIG. 10. IL-15 induced dimerisation of the IL-2Rβ and IL-2Rγ receptor subunits. Representative data from three independent experiments.

[0016] FIG. 11: Western blot analysis of plasma samples (RENCA engrafted mice).

[0017] FIG. 12: Densitometric analysis of plasma samples western blots. X indicates that sample is missing.

[0018] FIG. 13: Statistical analysis on circulating ICC (plasma samples) (RENCA engrafted mice).

[0019] FIG. 14: Western blot analysis of tumour samples (RENCA engrafted mice).

[0020] FIG. 15: Densitometric analysis of tumour samples western blots. X indicates that sample is missing.

[0021] FIG. 16: Statistical analysis of ICC addressed to the RENCA tumours.

[0022] FIG. 17: Statistical analysis of ICC-PVGLIG behaviour in plasma versus tumour of RENCA engrafted mice.

[0023] FIG. 18: Deconvoluted MS spectrum of NHS67-PVGLIG-IL-15 obtained after deglycosylation RP-LC separation.

[0024] FIG. 19: Deconvoluted MS spectrum of Fc/2 NHS67-PVGLIG-IL-15 obtained after deglycosylation, IdEs digestion and RP-LC separation.

[0025] FIG. 20: Deconvoluted MS spectrum of H16L16-PVGLIG-IL-15 obtained after deglycosylation RP-LC separation.

[0026] FIG. 21: Deconvoluted MS spectrum of Fc/2 H16L16-PVGLIG-IL-15 obtained after deglycosylation, IdEs digestion and RP-LC separation.

[0027] FIG. 22: SDS-PAGE analysis of purified c9G4-PVGLIG-hIL-15, NHS76-PVGLIG-hIL-15 and H16L16-PVGLIG-hIL-15 ICC in non-reduced/heated (NRH) and reduced/heated (RH) conditions.

[0028] FIG. 23: Murine T cell activation with ICC compared to controls. Activation measured by T cells expression of CD69 (A) or CD25 (B) in presence of cleaved and uncleaved NHS76-PVGLIG-IL-15 or controls and by T cell expression of CD69 (C) or CD25 (D) in presence of cleaved and uncleaved H16L16-PVGLIG-IL-15 or controls.

[0029] FIG. 24: Human T cell activation with ICC compared to controls. Activation measured by T cells expression of CD69 (A) or CD25 (B) in presence of cleaved and uncleaved NHS76-PVGLIG-IL-15 or controls and by T cell expression of CD69 (C) or CD25 (D) in presence of cleaved and uncleaved H16L16-PVGLIG-IL-15 or controls.

[0030] FIG. 25: Human T cell activation with ICC compared to controls. Activation measured by T cells secretion of INFγ in presence of cleaved and uncleaved NHS76-PVGLIG-IL-15 or controls for two different donors (Donor 1 (A) and Donor 2 (B)). Upper panel: activation measured by T cell secretion of INFγ in presence of cleaved and uncleaved H16L16-PVGLIG-IL-15 or controls for two different donors (Donor 1 (C) and Donor 2 (D)).

[0031] FIG. 26: Analysis of IL-8 production levels in A431 conditioned culture media after a 24 h incubation with the different samples. IL-8 relative content is determined using DUOSET ELISA and is expressed in optical unit at 450 nm.

[0032] FIG. 27: Induction of ISRE-dependent luciferase dependent production by hIFNα2a. hIFNα2a activity was assayed in c9G4-PVGLIG-hIFNα2a (A), NHS76-PVGLIG-hIFNα2a (B), and H16/L16-PVGLIG-hIFNα2a, with (C) or without (D) preincubation of the cells with 10 μg/ml H16/L16 antibody, by monitoring luminescence produced in the GloResponse™ ISRE-luc2P/HEK293 (Promega).

[0033] FIG. 28: IL-15 activity after a 6 h incubation with/without urokinase. IL-15 relative content is determined using IL-15 Bioassay and is expressed in luminescence.

[0034] FIG. 29: Evaluation of hIFNα activity after uPA-mediated cleavage of H16/L16-SGRSA hIFNα2a (A) and H16/L16-PSSRRRVN hIFNα2a (B). hIFNα activity was assayed after a 24 h-incubation of H16/L16-SGRSA hIFNα2a (A) and H16/L16-PSSRRRVN hIFNα2a (B) with/without urokinase and after IGF1R receptor saturation in ISRE-luc2/HEK293. Relative hIFNα activity is determined using GloResponse ISRE-luc2P Bioassay and is expressed in luminescence.

[0035] FIG. 30: Evaluation of hCXCL10 activity after uPA-mediated cleavage of c9G4-GSRS-CXCL10 (A), NHS76-GSRS-CXCL10 (B), and H16/L16-SGRS-CXCL10 (C). Relative hCXCL10 activity is determined using PathHunter eXpress CXCR3 CHOK1 β-arrestin GPCR assay and is expressed in luminescence.

[0036] FIG. 31. Protein complexes used.

[0037] FIG. 32: List of the protein complexes used. For each molecule are indicated its code, its name, and each of its components. The mode of interaction (covalent or co-expression) between the cofactor and the immunocytokine is also mentioned.

[0038] FIG. 33: Productivity and monomer levels of the molecules produced in HEK293 cells. The bar chart represents productivity of the cells expressing the different molecules (colour scale from light to dark: low to high productivity). These molecules have been characterised by SEC analysis and the monomer rate of the molecule is reported on the graph (cross); the values obtained for K03201-077 and K03201-079 were 84% and 87%, respectively. In the event that the monomer level is lower than 80% molecules were submitted to a supplementary round of purification.

[0039] FIG. 34: Evaluation of IL-15 activity after MMP-9-mediated cleavage of the ICC. Relative IL-15 activity is determined using the IL-15 Bioassay (Promega) and expressed as luminescence. ICC were cleaved by MMP-9 (dotted lines) or not (solid lines) prior to the assay. (A) Molecules without cofactor; clockwise, from top left: K03201-002, K03201-076, K03201-073; (B) Molecule with sushi/covalent; clockwise, from top left: K03201-034, K03201-046, K03201-074; (C) Molecule with sushi+/covalent; clockwise, from top left: K03201-069, K03201-072, K03201-075; (D) Molecule with sushi+/coexpression; left: K03201-077, right: K03201-071; (E) Molecule with sIL-15Rα/coexpression; left: K03201-027, right: K03201-070; (F) Molecules with 9G4 antibody; clockwise, from top left: K03201-086, K03201-029, K00901-006; (G) Molecules with NHS76 antibody; clockwise, from top left: K03001-002, K03001-025, K03001-023; (H) Molecules with NHS76 antibody; left: K03001-024, right: K03001-026.

[0040] FIG. 35: Evaluation of ICC construct activity in a NK cell assay. The bars represent levels of IFNγ produced in pg/mL, open circles the % of CD69⁺ NK cells, and filled circles total NKp46⁺ NK cells.

[0041] FIG. 36: AUC(0-last)/dose for total antibody measured in mouse plasma after a single IV dosing in study 1.

[0042] FIG. 37: AUC(0-last)/dose for (A) total antibody and (B) total ICC measured in mouse plasma after a single IV dosing in study 2.

[0043] FIG. 38: In vivo effect of K03201-079 on NK cells in a renal cell carcinoma model. (A) Evaluation of in vivo effect of K03201-079 on NK cells in the RENCA model. (B) Comparison of in vivo effect of K03201-079 and rIL-15 on NK cells in the RENCA model.

### DESCRIPTION

[0044] The present disclosure provides a protein complex with prolonged in vivo half-life and increased in vitro activity, and capable of activating an immune response in the tumour microenvironment, thereby conferring protective anti-tumour immunity.

[0045] This protein complex comprises an “immunocytokine”, i.e., a fusion between an antibody or a fragment or a derivative thereof and a cytokine. The antibody moiety in the present immunocytokine targets the tumour where the cytokine is released to exert its action. This confers greater specificity to the fusion protein, i.e. it generates fewer side effects than immunocytokines of the prior art which merely rely on localised proteolysis for targeting cytokine activity to the tumour (Skrombolas et al., 2019) or than molecules such as the IL-15 superagonist whose bioactivity is not restricted to the tumour (Guo et al., 2017). The immunocytokine of the present protein complex comprises a peptide linker which can be cleaved between the two moieties, allowing better control of the therapeutic activity of the molecule: the fusion protein is surprisingly inactive in the blood but is activated upon reaching the tumour site. The cleavable peptide linker is preferentially cleaved in the tumour microenvironment, thus releasing the cytokine. Targeted delivery of the cytokine thus potentiates its anti-tumour activity, whilst reducing the risks of cytokine-associated toxicity. In addition, the present inventors have surprisingly found that this immunocytokine is even more effective when complexed with a specific cofactor. Not only is the activity of the immunocytokine still tightly controlled, i.e., the cytokine moiety is only activated when released at the tumour site, but the presence of the cofactor results in an immunocytokine with a longer half-life in the plasma. This is particularly advantageous since lower doses are needed to reach similar therapeutic effects as the immunocytokine alone.

[0046] Moreover, the present protein complex of immunocytokine and cofactor can surprisingly be produced at high levels and with a high degree of purity. The expression of the immunocytokine in the presence of the cofactor, either as a fusion or by coexpression, results in higher yields than in the absence, and with lower levels of aggregates. Smaller culture volumes and fewer expression steps are needed to obtain therapeutically active amounts of the immunocytokine. Expressing the cofactor with the immunocytokine thus improves the quantity and quality of the efficient expression and production of this valuable biomolecule while minimising time and cost.

[0047] This makes the present immunocytokine, in complex with the cofactor, an excellent candidate for a protein therapeutic drug.

[0048] In a first aspect, the invention thus relates to a protein complex comprising:
[0049] i) a fusion protein comprising an antibody, or antigen-binding fragment thereof, a cleavable peptide linker, and a cytokine or a functional fragment thereof; and
[0050] ii) a cofactor.

[0051] As used herein, the “protein complex” of the present invention refers to a protein formed by binding of two different monomeric proteins. In the present disclosure, the two monomeric proteins are the immunocytokine and the cofactor. The cofactor may or may not be covalently linked to the fusion protein. In a first aspect, the cofactor is covalently bound to the fusion protein. In another embodiment, the cofactor is not covalently bound to the fusion protein.

[0052] Preferably, the cytokine is IL-15. In another preferred embodiment, the cofactor is IL-15Rα or an IL-15-binding fragment thereof. More preferably, the cytokine is IL-15 and the cofactor is IL-15Rα or an IL-15-binding fragment thereof.

[0053] A “fusion protein” refers to a chimeric protein encoding two or more separate protein sequences that are recombinantly expressed as a single moiety. “Fused,” “fusion,” “conjugated”, and “connected” are used interchangeably herein. These terms refer to the joining together of two more chemical elements or components, by whatever means including chemical conjugation or recombinant means. These terms are meant to encompass all conjugates, wherein said antibody, or antigen-binding protein thereof is somehow bound to the cleavable peptide linker and the cytokine or functional fragment thereof, by, e.g. covalent and/or non-covalent bonds. For example, two distinct proteins can be connected together by “in-frame fusion”, which refers to the joining of two or more open reading frames (ORFs) to form a continuous longer ORF, in a manner that maintains the correct reading frame of the original ORFs. Thus, the resulting recombinant fusion protein is a single protein containing two or more segments that correspond to polypeptides encoded by the original ORFs (which segments are not normally so joined in nature). For another example, the two proteins can also be linked together by use of a chemical crosslinker, which results in a protein conjugate that contains two individual polypeptides connected by a crosslinker. These terms encompass all binding arrangements. Preferred arrangements include antibody-linker-cytokine and cytokine-linker-antibody.

[0054] Antibodies

[0055] An “antibody” as used herein refers to an immunoglobulin (Ig) molecule capable of specific binding to a target, the “antigen”, such as a carbohydrate, polynucleotide, lipid, polypeptide, etc., through at least one antigen recognition site, located in the variable region of the immunoglobulin molecule. The antibody or antigen-binding protein thereof of the present fusion protein mediates the targeted delivery of immunocytokines into disease environments and/or to specific cell subsets. Preferred target antigens are those that are overexpressed in diseased tissues, while remaining at low levels elsewhere. Such antigens are well-known to the skilled person, as-they have been the subject of numerous studies over the years. For example, the antibody moiety of the present immunocytokine may target antigens overexpressed on the surface of malignant cells (e.g., epithelial cell adhesion molecule, EGFR, IGF-1R, GD2 disialoganglioside, HER2/neu, CD20 and CD30), as well as targeting of neoangiogenic antigens found in tumours and chronic inflammation sites (e.g., fibronectin, splice variants EDA/EDB and A1 domain of tenascin C).

[0056] As used herein, the term “antibody” encompasses not only intact polyclonal or monoclonal antibodies, but also any antigen binding fragment (i.e., “antigen-binding fragment”) or single chain thereof, fusion proteins comprising an antibody, and any other modified configuration of the immunoglobulin molecule that comprises an antigen recognition site including, for example without limitation, scFv, single domain antibodies {e.g., shark and camelid antibodies), maxibodies, minibodies, intrabodies, diabodies, triabodies, tetrabodies, v-NAR and bis-scFv. As used herein, the term “antibody” encompasses both full-length antibodies and their antigen-binding fragments, as well as any derivative thereof. Preferably, the antibody according to the invention, or its derived compounds or antigen-binding fragments, is a monoclonal antibody.

[0057] A “monoclonal antibody”, as used herein, means an antibody arising from a nearly homogeneous antibody population. More particularly, the individual antibodies of a population are identical except for a few possible naturally-occurring mutations which can be found in minimal proportions. In other words, a monoclonal antibody consists of a homogeneous antibody arising from the growth of a single cell clone (for example a hybridoma, a eukaryotic host cell transfected with a DNA molecule coding for the homogeneous antibody, a prokaryotic host cell transfected with a DNA molecule coding for the homogeneous antibody, etc.) and is generally characterised by heavy chains of one and only one class and subclass, and light chains of only one type. Monoclonal antibodies are highly specific and are directed against a single antigen. In addition, in contrast with preparations of polyclonal antibodies which typically include various antibodies directed against various determinants, or epitopes, each monoclonal antibody is directed against a single epitope of the antigen. Since these antibodies are directed against a single epitope, they are highly specific.

[0058] An “epitope” is the site on the antigen to which binds the antibody. It can be formed by contiguous residues or by non-contiguous residues brought into close proximity by the folding of an antigenic protein. Epitopes formed by contiguous amino acids are typically retained on exposure to denaturing solvents, whereas epitopes formed by non-contiguous amino acids are typically lost under said exposure.

[0059] The generation of the antibody reactive with a specific antigen can be realised by any method known by the man skilled in the art, such as for example, fusion of a myeloma cell with spleen cells from immunised mice or other species compatible with the selected myeloma cells (Kohler & Milstein, Nature, 256:495-497, 1975). The immunised animals could include transgenic mice with human immunoglobulin loci which then directly produce human antibodies. Alternatively, an antibody can be generated by recombinant methods such as selection of libraries of recombinant antibodies in phage or similar vectors. In general, for the preparation of monoclonal antibodies or their functional fragments, especially of murine origin, it is possible to refer to techniques which are described in particular in the manual “Antibodies” (Harlow and Lane, Antibodies: A Laboratory Manual, Cold Spring Harbor Laboratory, Cold Spring Harbor N.Y., pp. 726, 1988) or to the technique of preparation from hybridomas described by Kohler and Milstein (Nature, 256:495-497, 1975).

[0060] An antibody includes an antibody of any class, such as IgG, IgA, or IgM (or sub-class thereof), and the antibody need not be of any particular class. Depending on the antibody amino acid sequence of the constant region of its heavy chains, immunoglobulins can be assigned to different classes.

[0061] A typical IgG antibody is composed of two identical heavy chains and two identical light chains that are joined by disulphide bonds. Each heavy and light chain contains a constant region and a variable region. Each variable region contains three segments called “complementarity-determining regions” (“CDRs”) or “hypervariable regions”, which are primarily responsible for binding an epitope of an antigen. They are usually referred to as CDR1, CDR2, and CDR3, numbered sequentially from the N-terminus. The more highly conserved portions of the variable regions are called the “framework regions”.

[0062] There are three heavy-chain CDRs and 3 light-chain CDRs. The term “CDR” or “CDRs” is used here in order to indicate, according to the case, one of these regions or several, or even the whole, of these regions which contain the majority of the amino acid residues responsible for the binding by affinity of the antibody for the antigen or the epitope which it recognises.

[0063] As used herein, “VH” or “V_{H}” refers to the variable region of an immunoglobulin heavy chain of an antibody, including the heavy chain of an Fv, scFv, dsFv, Fab, Fab′, or F(ab′)2 fragment. Reference to “VL” or “V_{L}” refers to the variable region of the immunoglobulin light chain of an antibody, including the light chain of an Fv, scFv, dsFv, Fab, Fab′, or F(ab′)2 fragment.

[0064] Antibody constant domains are not involved directly in binding an antibody to an antigen, but exhibit various effector functions. The heavy chain constant regions that correspond to the different classes of immunoglobulins are called α, δ, ε, γ, and μ, respectively. Depending on the amino acid sequence of the constant region of their heavy chains, antibodies or immunoglobulins can be assigned to different classes, i.e., IgA, IgD, IgE, IgG, and IgM, and several of these may be further divided into subclasses (isotypes), e.g., IgG1, IgG2, IgG3, and IgG4; IgA1 and IgA2 (see, W. E. Paul, ed., 1993, Fundamental Immunology, Raven Press, New York, N.Y.).

[0065] Papain digestion of antibodies produces two identical antigen binding fragments, called Fab fragments, each with a single antigen binding site, and a residual “Fc” fragment. The crystal structure of the human IgG Fc domain has been determined (Deisenhofer, Biochemistry, 20, 2361-2370, 1981). As used in the specification and claims, “immunoglobulin Fc domain or Fc” means the carboxyl-terminal portion of the immunoglobulin heavy chain constant region. A “native sequence Fc domain”, as used herein, comprises an amino acid sequence identical to the amino acid sequence of a Fc domain found in nature. Native sequence human Fc domains include a native sequence human IgG1 Fc domain (non-A and A allotypes); native sequence human IgG2 Fc domain; native sequence human IgG3 Fc domain; and native sequence human IgG4 Fc domain as well as naturally occurring variants thereof.

[0066] Although the boundaries of the Fc domain of an immunoglobulin heavy chain might vary, the human IgG heavy chain Fc domain is usually defined to stretch from an amino acid residue at position Cys226 or Pro230 in the hinge region, to the carboxyl-terminus thereof containing the CH2 and CH3 domain of the heavy chain. Throughout the present specification and claims, the numbering of the residues in an immunoglobulin heavy chain is that of the EU index as in Kabat et al., Sequences of Proteins of Immunological Interest, 5th Ed. Public Health Service, National Institutes of Health, Bethesda, Md. (1991). The “EU index as in Kabat” refers to the residue numbering of the human IgG1 EU antibody.

[0067] The term “hinge region” is generally defined as stretching from Glu216 to Pro230 of human IgG1 (Burton, Mol Immunol, 22: 161-206, 1985). Hinge regions of other IgG isotypes may be aligned with the IgG1 sequence by placing the first and last cysteine residues forming inter-heavy chain S—S bonds in the same positions. The “CH2 domain” of a human IgG Fc portion (also referred to as “Cγ2” domain) usually extends from about amino acid 231 to about amino acid 340. The CH2 domain is unique in that it is not closely paired with another domain. Rather, two N-linked branched carbohydrate chains are interposed between the two CH2 domains of an intact native IgG molecule. It has been speculated that the carbohydrate may provide a substitute for the domain-domain pairing and help stabilize the CH2 domain (Burton, Mol Immunol, 22: 161-206, 1985). The “CH3 domain” comprises the stretch of residues C-terminal to a CH2 domain in an Fc portion (i.e., from about amino acid residue 341 to about amino acid residue 447 of an IgG).

[0068] The Fc domains are central in determining the biological functions of the immunoglobulin and these biological functions are termed “effector functions”. These Fc domain-mediated activities are mediated via immunological effector cells, such as killer cells, natural killer cells, and activated macrophages, or various complement components. These effector functions involve activation of receptors on the surface of said effector cells, through the binding of the Fc domain of an antibody to the said receptor or to complement component(s). The antibody-dependent cellular cytotoxicity (ADCC) and complement-dependent cytotoxicity (CDC) activities involve the binding of the Fc domain to Fc-receptors such as FcγRI, FcγRII, FcγRIII of the effector cells or complement components such as C1q. Of the various human immunoglobulin classes, human IgG1l (and IgG3 mediate ADCC more effectively than IgG2 and IgG4.

[0069] The antibodies of the invention also comprise chimeric or humanised antibodies.

[0070] A chimeric antibody is one containing a natural variable region (light chain and heavy chain) derived from an antibody of a given species in combination with constant regions of the light chain and the heavy chain of an antibody of a species heterologous to said given species.

[0071] The antibodies, or chimeric fragments of same, can be prepared by using the techniques of recombinant genetics. For example, the chimeric antibody could be produced by cloning recombinant DNA containing a promoter and a sequence coding for the variable region of a nonhuman monoclonal antibody of the invention, notably murine, and a sequence coding for the human antibody constant region. A chimeric antibody according to the invention coded by one such recombinant gene could be, for example, a mouse-human chimera, the specificity of this antibody being determined by the variable region derived from the murine DNA and its isotype determined by the constant region derived from human DNA. It will be appreciated that in this case, the Fc domain of the chimeric antibody is of human origin. Refer to Verhoeyn et al. (BioEssays, 8:74, 1988) for methods for preparing chimeric antibodies.

[0072] In addition, the invention also relates to humanised antibodies arising from the murine antibodies described above. “Humanised antibody” refers herein to an antibody that contains CDR regions derived from an antibody of nonhuman origin, the other parts of the antibody molecule being derived from one (or several) human antibodies. In addition, some of the skeleton segment residues (called FR) can be modified to preserve binding affinity (Jones et al., Nature, 321:522-525, 1986; Verhoeyen et al., Science, 239:1534-1536, 1988; Riechmann et al., Nature, 332:323-327, 1988). The Fc domain of a humanised antibody will be of human origin, as in chimeric antibodies.

[0073] The humanised antibodies of the invention or fragments of same can be prepared by techniques known to a person skilled in the art (such as, for example, those described in the documents Singer et al., J. Immun., 150:2844-2857, 1992; Mountain et al., Biotechnol. Genet. Eng. Rev., 10:1-142, 1992; and Bebbington et al., Bio/Technology, 10: 169-175, 1992). Such humanised antibodies are preferred for their use in methods involving in vitro diagnoses or preventive and/or therapeutic treatment in vivo. Other humanisation techniques, also known to a person skilled in the art, such as, for example, the “CDR grafting” technique described by PDL in patents EP 0 451 261, EP 0 682 040, EP 0 939 127, EP 0 566 647 or U.S. Pat. Nos. 5,530,101, 6,180,370, 5,585,089 and 5,693,761. U.S. Pat. No. 5,639,641 or U.S. Pat. Nos. 6,054,297, 5,886,152 and 5,877,293 can also be cited.

[0074] Although it is possible to use antibody fragments in the present immunocytokines, it is preferred to use full-length, bivalent antibodies. A monovalent antibody such as a Fab or a scFv has only a single binding site for an antigen (as distinct from natural ‘bivalent’ antibodies), i.e., is composed of a single antigen-binding arm. As known to the skilled person, the greater an immunoglobulin's valency (number of antigen binding sites), the greater the amount of antigen it can bind. There is a significant affinity change between monovalent and bivalent bindings with usually a ca. 1,500-fold change in Kd values. Bivalent antibodies can thus be used at a lower dose to attain similar therapeutic efficiency as monovalent Fab or scFv fragments, thus limiting the risks of secondary effects.

[0075] Preferably, the antibody which can be used in the immunocytokines described herein is an antibody which does not bind specifically the cytokine moiety of said immunocytokine. For example, if the cytokine is IL-12, the antibody according to this embodiment is not an antibody which binds IL-12.

[0076] In another embodiment the antibody used in the present immunocytokine is an antibody which binds specifically a tumour-associated antigens (TAA) or a tumour-specific antigens (TSA). As used herein, a “tumour-associated antigen” is a protein or other molecule that is found on cancer cells whilst a “tumour-specific antigen” is a protein or other molecule that is found on cancer cells and not on normal cells. Tumour-specific antigens are known in the art

[0077] Tumour antigens can be classified in a variety of ways. Tumour antigens include antigens encoded by genes that have undergone chromosomal alteration. Many of these antigens are found in lymphoma and leukaemia. Even within this classification, antigens can be characterised as those that involve activation of quiescent genes. These include BCL-1 and IgH (Mantel cell lymphoma), BCL-2 and IgH (Follicular lymphoma), BCL-6 (Diffuse large B-cell lymphoma), TAL-1 and TCR delta or SIL (T-cell acute lymphoblastic leukaemia), c-MYC and IgH or IgL (Burkitt lymphoma), MUN/IRF4 and IgH (Myeloma), PAX-5 (BSAP) (Immunocytoma).

[0078] Other tumour antigens that involve chromosomal alteration and thereby create a novel fusion gene and/or protein include RARoa, PML, PLZF, NPMor NuM4 (Acute promyelocytic leukaemia), BCR and ABL (Chronic myeloid/acute lymphoblastic leukaemia), MLL (HRX) (Acute leukaemia), E2A and PBXor HLF (B-cell acute lymphoblastic leukaemia), NPM, ALK (Anaplastic large cell leukaemia), and NPM, MLF-1 (Myelodysplastic syndrome/acute myeloid leukaemia).

[0079] Other tumour antigens are specific to a tissue or cell lineage. These include cell surface proteins such as CD20, CD22 (Non-Hodgkin's lymphoma, B-cell lymphoma, Chronic lymphocytic leukaemia (CLL)), CD52 (B-cell CLL), CD33 (Acute myelogenous leukaemia (AML)), CD 10 (gp100) (Common (pre-B) acute lymphocytic leukaemia and malignant melanoma), CD3/T-cell receptor (TCR) (T-cell lymphoma and leukaemia), CD79/B-cell receptor (BCR) (B-cell lymphoma and leukaemia), CD26 (Epithelial and lymphoid malignancies), Human leukocyte antigen (HLA)-DR, HLA-DP, and HLA-DQ (Lymphoid malignancies), RCAS1 (Gynaecological carcinomas, biliary adenocarcinomas and ductal adenocarcinomas of the pancreas), and Prostate specific membrane antigen (Prostate cancer).

[0080] Tissue- or lineage-specific tumour antigens also include epidermal growth factor receptors (high expression) such as EGFR (HER1 or erbB1) and EGFRvIII (Brain, lung, breast, prostate and stomach cancer), erbB2 (HER2 or HER2/neu) (Breast cancer and gastric cancer), erbB3 (HER3) (Adenocarcinoma), and erbB4 (HER4) (Breast cancer).

[0081] Tissue- or lineage-specific tumour antigens also include cell-associated proteins such as Tyrosinase, Melan-A/MART-1, tyrosinase related protein (TRP)-1/gp75 (Malignant melanoma), Polymorphic epithelial mucin (PEM) (Breast tumours), and Human epithelial mucin (MUC1) (Breast, ovarian, colon and lung cancers).

[0082] Tissue- or lineage-specific tumour antigens also include secreted proteins such as Monoclonal immunoglobulin (Multiple myeloma and plasmacytoma), Immunoglobulin light chains (Multiple Myeloma), alpha-fetoprotein (Liver carcinoma), Kallikreins 6 and 10 (Ovarian cancer), Gastrin-releasing peptide/bombesin (Lung carcinoma), and Prostate specific antigen (Prostate cancer).

[0083] Still other tumour antigens are cancer testis (CT) antigens that are expressed in some normal tissues such as testis and in some cases placenta. Their expression is common in tumours of diverse lineages and as a group the antigens form targets for immunotherapy. Examples of tumour expression of CT antigens include MAGE-A1, -A3, -A6, -A12, BAGE, GAGE, HAGE, LAGE-1, NY-ESO-1, RAGE, SSX-1, -2, -3, -4, -5, -6, -7, -8, -9, HOM-TES-14/SCP-1, HOM-TES-85 and PRAME. Still other examples of CT antigens and the cancers in which they are expressed include SSX-2, and -4 (Neuroblastoma), SSX-2 (HOM-MEL-40), MAGE, GAGE, BAGE and PRAME (Malignant melanoma), HOM-TES-14/SCP-1 (Meningioma), SSX-4 (Oligodendroglioma), HOM-TES-14/SCP-1, MAGE-3 and SSX-4 (Astrocytoma), SSX member (Head and neck cancer, ovarian cancer, lymphoid tumours, colorectal cancer and breast cancer), RAGE-1, -2, -4, GAGE-1-2, -3, -4, -5, -6, -7 and -8 (Head and neck squamous cell carcinoma (HNSCC)), HOM-TES14/SCP-1, PRAME, SSX-1 and CT-7 (Non-Hodgkin's lymphoma), and PRAME (Acute lymphoblastic leukaemia (ALL), acute myelogenous leukaemia (AML) and chronic lymphocytic leukaemia (CLL)).

[0084] Other tumour antigens are not specific to a particular tissue or cell lineage. These include members of the carcinoembryonic antigen (CEA) family: CD66a, CD66b, CD66c, CD66d and CD66e. These antigens can be expressed in many different malignant tumours and can be targeted by immunotherapy.

[0085] Still other tumour antigens are viral proteins and these include Human papilloma virus protein (cervical cancer), and EBV-encoded nuclear antigen (EBNA)-1 (lymphomas of the neck and oral cancer).

[0086] Still other tumour antigens are mutated or aberrantly expressed molecules such as but not limited to CDK4 and beta-catenin (melanoma).

[0087] In some embodiments, the antigen is a tumour antigen. The tumour antigen may be selected from the group consisting of MART-1/Melan-A, gp100, adenosine deaminase-binding protein (ADAbp), FAP, cyclophilin b, colorectal associated antigen (CRC)-0017-1A/GA733, carcinoembryonic antigen (CEA), CAP-1, CAP-2, etv6, AML1, prostate specific antigen (PSA), PSA-1, PSA-2, PSA-3, prostate-specific membrane antigen (PSMA), T-cell receptor/CD3-zeta chain, and CD20. The tumour antigen may also be selected from the group consisting of MAGE-A1, MAGE-A2, MAGE-A3, MAGE-A4, MAGE-A5, MAGE-A6, MAGE-A7, MAGE-A8, MAGE-A9, MAGE-A10, MAGE-A11, MAGE-A12, MAGE-Xp2 (MAGE-B2), MAGE-Xp3 (MAGE-B3), MAGE-Xp4 (MAGE-B4), MAGE-C1, MAGE-C2, MAGE-C3, MAGE-C4, MAGE-05). In still another embodiment, the tumour antigen is selected from the group consisting of GAGE-1, GAGE-2, GAGE-3, GAGE-4, GAGE-5, GAGE-6, GAGE-7, GAGE-8, GAGE-9. And in yet a further embodiment, the tumour antigen is selected from the group consisting of BAGE, RAGE, LAGE-1, NAG, GnT-V, MUM-1, CDK4, tyrosinase, p53, MUC family, HER2/neu, p21 ras, RCAS 1, α-fetoprotein, E-cadherin, α-catenin, β-catenin, .gamma.-catenin, p120ctn, gp100Pmel117, PRAME, NY-ESO-1, cdc27, adenomatous polyposis coli protein (APC), fodrin, Connexin 37, Ig-idiotype, p15, gp75, GM2 ganglioside, GD2 ganglioside, human papilloma virus proteins, Smad family of tumour antigens, Imp-1, P1A, EBV-encoded nuclear antigen (EBNA)-1, brain glycogen phosphorylase, SSX-1, SSX-2 (HOM-MEL-40), SSX-1, SSX-4, SSX-5, SCP-1 and CT-7, and c-erbB-2.

[0088] Cancer or tumour antigens can also be classified according to the cancer or tumour they are associated with (i.e., expressed by). Cancers or tumours associated with tumour antigens include acute lymphoblastic leukaemia (etv6; am11; cyclophilin b), B cell lymphoma (Ig-idiotype); Burkitt's (Non-Hodgkin's) lymphoma (CD20); glioma (E-cadherin; α-catenin; β-catenin; .gamma.-catenin; p120ctn), bladder cancer (p21ras), biliary cancer (p21ras), breast cancer (MUC family; HER2/neu; c-erbB-2), cervical carcinoma (p53; p21ras), colon carcinoma (p21ras; HER2/neu; c-erbB-2; MUC family), colorectal cancer (Colorectal associated antigen (CRC)-0017-1A/GA733; APC), choriocarcinoma (CEA), epithelial cell-cancer (cyclophilin b), gastric cancer (HER2/neu; c-erbB-2; ga733 glycoprotein), hepatocellular cancer (α-fetoprotein), Hodgkin's lymphoma (Imp-1; EBNA-1), lung cancer (CEA; MAGE-3; NY-ESO-1), lymphoid cell-derived leukaemia (cyclophilin b), melanoma (p15 protein, gp75, oncofoetal antigen, GM2 and GD2 gangliosides), myeloma (MUC family; p21 ras), non-small cell lung carcinoma (HER2/neu; c-erbB-2), nasopharyngeal cancer (Imp-1; EBNA-1), ovarian cancer (MUC family; HER2/neu; c-erbB-2), prostate cancer (Prostate Specific Antigen (PSA) and its immunogenic epitopes PSA-1, PSA-2, and PSA-3; PSMA; HER2/neu; c-erbB-2), pancreatic cancer (p21ras; MUC family; HER2/neu; c-erbB-2; ga733 glycoprotein), renal (HER2/neu; c-erbB-2), squamous cell cancers of cervix and oesophagus (viral products such as human papilloma virus proteins and non-infectious particles), testicular cancer (NY-ESO-1), T cell leukaemia (HTLV-1 epitopes), and melanoma (Melan-A/MART-1; cdc27; MAGE-3; p21ras; gp100^{Pme117}). More preferably, the antibody of the present immunocytokine is an antibody which does not bind specifically the cytokine moiety of said immunocytokine, but binds specifically a tumour-associated antigens (TAA) or a tumour-specific antigens (TSA).

[0089] Examples of antibodies which can be used in the present invention include: Alemtuzumab (CD52), Alirocumab (PCSK9), Arcitumomab (Human CEA (carcinoembryonic antigen)), Atezolizumab (PD-L1), Avelumab (PD-L1), AVE1642 (IGF-1R), Basiliximab (CD25 (a chain of IL-2 receptor)), Belimumab (BLyS), Bevacizumab (VEGF), Blinatumomab (CD19), Brodalumab (IL-17RA), Capromab (Tumour surface antigen PSMA), Catumaxomab (EpCAM and CD3), Catumaxomab (EpCAM), Certolizumab pegol (TNFa), Cetuximab (EGFR), Cixutumumab (IGF-1R), Daclizumab (CD25 (a chain of IL2 receptor)), Dalotuzumab (IGF-1R), Daratumumab (CD38), Dinutuximab (GD2), Dupilumab (IL-4Ra), Durvalumab (PD-L1), Efalizumab (CD11a), Elotuzumab (SLAMF7), Evolocumab (LDL-C/PCSK9), Fanolesomab (CD15), Figitumumab (IGF-1R), Ganitumab (IGF-1R), Golimumab (TNFa), Ibritumomab tiuxetan (CD20), Infliximab (TNFα), Ipilimumab (CTLA-4), Necitumumab (EGFR), Nivolumab (PD-1), Nofetumomab (Carcinoma-associated antigen), Obinutuzumab (CD20), Ocrelizumab (CD20), Ofatumumab (CD20), Olaratumab (PDGFR-α), Panitumumab (EGFR), Pembrolizumab (PD-1), Pertuzumab (HER2), Ramucirumab (VEGF), Ranibizumab (VEGF-A), Rituximab (CD20), Siltuximab (cCLB8), Tocilizumab (IL-6 receptor), Trastuzumab (HER-2), Vedolizumab (Integrin-α4β7), Votumumab (Cytokeratin tumour-associated antigen).

[0090] Cleavable Peptide Linkers

[0091] A “peptide linker” as used herein refers to an amino acid stretch between two different peptide or polypeptide subunits, e.g. between an antibody and a cytokine. Linkers have often been used in the art. They generally adopt an extended conformation to allow for maximal flexibility. In addition, they may contain a site recognised by an enzyme.

[0092] A “cleavable peptide linker” as used herein refers to a polyvalent linker covalently bonded to an antibody, or an antigen-binding fragment thereof, and covalently bonded to a cytokine, or fragment thereof, which is enzymatically cleavable (e.g. at a cleavage site). According to the invention, upon hydrolysis (proteolytic cleavage) of the cleavable peptide linker, the cytokine moiety, preferably IL-15, is released, enabling it to exert its therapeutic activity. In preferred embodiments the cleavable peptide linker is recombinantly expressed as part of the immunocytokine. In other embodiments, the cleavable peptide linker is a linker formed by reacting a functional (reactive) group attached to the linker with an antibody, or an antigen-binding fragment thereof using, for example, conjugate chemistry. In yet other embodiments, the cleavable peptide linker is a linker formed by reacting a functional (reactive) group attached to the linker with a cytokine, or fragment thereof, using, for example, conjugate chemistry. In a preferred embodiment, the cleavable peptide linker connects the cytokine, or fragment thereof, to the heavy chain of the antibody, or an antigen-binding fragment thereof. In another embodiment, the cleavable peptide linker connects the cytokine, or fragment thereof, to the light chain of the antibody, or an antigen-binding fragment thereof. The cleavable peptide linker may connect the cytokine, or fragment thereof, to the N-terminus of one of the heavy and light chains of the antibody, or an antigen-binding fragment thereof. It is also possible that the cleavable peptide linker connects the cytokine, or fragment thereof, to the C-terminus of the heavy and light chains of the antibody, or an antigen-binding fragment thereof. Most preferably, the cleavable peptide linker connects the cytokine, or fragment thereof, to the N-terminus or C-terminus of the heavy chain of the antibody, or an antigen-binding fragment thereof.

[0093] In some embodiments, the immunocytokine may contain only one cleavable peptide linker. In some other embodiments, the immunocytokine may contain more than one cleavable peptide linker. Preferably, in that case, the more than one cleavable peptide linker are contiguous, i.e. they are attached one to the other, with the cleavable peptide linker at one end being bound to the antibody and the cleavable peptide linker at the other end being bound to the cytokine, preferably 11-15, or a functional fragment thereof. In a particular embodiment, the immunocytokine may comprise at least 1, at least 2, at least 3; at least 4, at least 5 cleavable peptide linkers. In a specific embodiment, the immunocytokine comprises 2 cleavable peptide linkers.

[0094] The cleavable peptide linker provided herein may include a protease cleavage site.

[0095] A “cleavage site” as used herein, refers to a recognisable site for cleavage of a portion of a linker (e.g., cleavable peptide linker as described hereinabove) present in an immunocytokine described herein. Thus, a cleavage site may be found in the sequence of a cleavable peptide linker as described herein, including embodiments thereof. In embodiments, the cleavage site is an amino acid sequence that is recognised and cleaved by a cleaving agent (e.g. a peptidyl sequence). Exemplary cleaving agents include proteins, enzymes, DNAzymes, RNAzymes, metals, acids, and bases. Exemplary cleavage sites are defined herein (see FIG. 7). They notably include PVGLIG (SEQ ID NO. 44), also referred to herein as L6, and dimers thereof (PVGLIGPVGLIG, SEQ ID NO. 202, L6-L6).

[0096] A “protease cleavage site” as used herein is a cleavage site which is recognised and specifically cleaved by a protease. According to a preferred embodiment, the protease cleavage site is a tumour-associated protease cleavage site. A “tumour-associated protease cleavage site” as used herein refers to an amino acid sequence recognised by a protease, whose expression is specific for a tumour cell or tumour cell environment thereof or mainly expressed in the tumour cell or tumour environment compared to healthy tissues or is only/mainly active in the tumour cell or tumour environment. In embodiments, the protease cleavage site is a matrix metalloprotease (MMP) cleavage site, a prostate specific antigen (PSA) protease cleavage site, a membrane type serine protease 1 (MT-SP1) protease cleavage site, a uPA urokinase plasminogen activator cleavage site, or a legumain protease cleavage site. In some embodiments, the matrix metalloprotease (MMP) cleavage site is a MMP 9 cleavage site, a MMP 13 cleavage site, or a MMP 2 cleavage site. Protease cleavage sites may be designated by a specific amino acid sequence but may also encompass any variation of this canonical amino acid sequence which is still recognised and cleaved by the protease of interest.

[0097] Preferably, the cleavable peptide linker is a matrix metalloprotease (MMP) cleavage site. More preferably, the cleavable peptide linker comprises a MMP 9 cleavage site or a MMP 2 cleavage site. Examples of MMP cleavage sites include GPLGIAGQ, GPLGLWAQ, GPLGMLSQ, PLGLAG, and PVGLIG.

[0098] In another preferred embodiment, the cleavable peptide linker is a urokinase plasminogen activator (uPA) cleavage site. Examples of uPA cleavage sites include SGRS, SGRSA, and PSSSRRRVN.

[0099] The term “MMP 2” or “MMP 2 protease” as used herein refers to the matrix metalloproteinase 2 (MMP 2). MMP-2 is the protein identified by the NCBI sequence reference GI: 189217853. The term “MMP-9” or “MMP9 protease” as used herein refers to the matrix metalloproteinase 9 (MMP-9). MMP9 is the protein identified by the NCBI sequence reference GI: 74272287. The term “MMP 13” or “MMP 13 protease” as used herein refers the matrix metalloproteinase 13 (MMP 13). MMP 13 is the protein identified by the NCBI sequence reference GL4505209. The term “PSA” or “PSA protease” as used herein refers to the prostate-specific antigen (PSA), also known as gamma seminoprotein or kallikrein-3. PSA is the protein identified by the NCBI sequence reference GL71834853. The term “PSMA” or “PSMA protease” as used herein refers to the prostate-specific membrane antigen (PSMA), also known as glutamate carboxypeptidase II (GCP II), N-acetyl-L-aspartyl-L-glutamate peptidase I (NAALADase I) or NAAG peptidase. PSMA is the protein identified by the NCBI sequence reference GL62548858. The term “fibroblast associated protein” as used herein refers to the fibroblast associated protein. Fibroblast associated protein is the protein as identified by the NCBI sequence reference GL 1888316. The term “MT-SPI” or “MT-SPI protease” as used herein refers to the membrane type serine protease 1 (MT-SPI). MT-SPI is the protein identified by the NCBI sequence reference GI: 1 1415040. The term “legumain” or “legumain protease” as used herein refers to the legumain protein. Legumain is the protein identified by the NCBI sequence reference GL2842759. The term uPA as used herein refers to the urokinase-type plasminogen activator identified by the NCBI sequence reference Gene ID: 5328.

[0100] In some embodiment, the cleavable peptide linker comprises at least 2, at least 3, at least 4, at least 5, at least 6, at least 7, at least 8, at least 9, at least 10, at last 11, at least 12, or at least 13 amino acids. In other embodiments, cleavable peptide linkers are 5-mers (i.e., peptides 5 amino acids in length), 6-mers (i.e., peptides 6 amino acids in length), 7-mers i.e., peptides 7 amino acids in length), 8-mers (i.e., peptides 8 amino acids in length), 9-mers (i.e., peptides 9 amino acids in length), 10-mers (i.e., peptides 10 amino acids in length), 11-mers (i.e., peptides 11 amino acids in length), 12-mers (i.e., peptides 12 amino acids in length), or 13-mers (i.e., peptides 13 amino acids in length).

[0101] Most preferably, said the sequence of said cleavage peptide linker is selected from the group consisting of: GPLGIAGQ, GPLGLWAQ, GPLGMLSQ, PLGLAG, PVGLIG, SGRS, SGRSA, and PSSSRRRVN.

[0102] Cytokines

[0103] The term “cytokine” as used herein refers to a member of a family of small secreted regulatory proteins which have an effect on the immune system. Cytokines are involved in cell-to-cell communication and regulate many cellular functions, such as cell survival and growth, as well as induction of the expression of many genes. Secretion of cytokines thus enables the rapid propagation of immune signalling in a multifaceted and efficient manner. Cytokines regulate the nature, intensity and duration of the immune response by exerting a variety of effects on lymphocytes and/or other cells. Indeed, cytokines are usually classified into pro- and anti-inflammatory cytokines. Some cytokines are also capable of mobilising the immune system to fight cancer (see e.g., Floros & Tarhini, Semin. Oncol. 42(4): 539-548, 2015). Cytokines can be produced by many cell types, including immune and non-immune cells. Examples of cytokines include interleukins, lymphokines, monokines, interferons, colony stimulating factors, and chemokines, inter olio. A “cytokine” as used herein may be any one of IL-1, IL-2, IL-3, IL-4, IL-5, IL-6, IL-7, IL-8, IL-9, IL-10, IL-11, IL-12, IL-13, IL-15, IL-16, IL-17, IL-18, IL-19, IL-20, IL-21, IL-22, IL-23, IL-24, IL-26, IL-28, IL-29, IL-33, IL-36, IL37, IL-38, IFN-α (including IFN-α1/13, IFN-α2, IFN-α4, IFN-α5, IFN-α6, IFN-α7, IFN-α8, IFN-α10, IFN-α14, IFN-α16, IFN-α17, and IFN-α21), IFN-β, IFN-γ, IFN-λ, TNF-α, TNF-β, TGF-β1, M-CSF, G-CSF, GM-CSF, and CXL10. According to the invention, the cytokine is preferably inactivated or attenuated when linked to the ICC and became active only after cleavage of ICC by the protease.

[0104] The term “functional fragment” with regard to said cytokines is to be interpreted essentially in analogy to the same term for antibodies (see below). Functional fragments and derivatives of cytokines are those that essentially have the same physiological function/activity as the naturally occurring cytokines. Notably, functional fragments and derivatives of cytokines are capable of binding the cytokine's cognate receptor.

[0105] Preferably, the cytokine is IL-15. By “IL-15” or “interleukin-15”, it is herein referred to a cytokine that regulates T and natural killer cell activation and proliferation. Interleukin-15 (IL-15) is a 14 to 15 kDa member of the 4α-helix bundle family of cytokines composed of 114 amino acids whose sequence is available under the accession number NP_000576.1. There is 97% sequence identity between human and simian IL-15 and 73% between human and mouse. This appears to be sufficient for hulL-15 to render it biologically active on simian and murine cells.

[0106] IL-15 displays high structural similarity to Interleukin-2 (IL-2). Like IL-2, IL-15 binds to and signals through a complex composed of IL-2/IL-15 receptor beta chain (CD122) and the common gamma chain (gamma-C, CD132). Specificity of the signalling is ensured by IL15 being recognised by the alpha unit of its receptor (IL15Rα), whilst IL-2 binds IL2Ra. IL-15 stimulates the production of proinflammatory cytokines (e.g. TNFα, IL-1, IFNγ), the proliferation and Ig synthesis of activated B cells, the activation of T_{H}1, monocytes and lymphokine activated killer cells, the proliferation of mast cells and T cells and inhibits the apoptosis of T and B cells. In addition to the mentioned functional activities IL-15 plays a pivotal role in the development, survival and function of NK cells [Joost J. Oppenheim et al., Cytokine Reference; 213-221, (2002)]. IL-15 is a cytokine that primarily stimulates the proliferation and cytotoxic functions of CD8T cells and NK cells leading to enhanced anti-tumour responses (Waldmann, J. Investi.g Dermatol. Symp. Proc. 16(1): S28-30, 2013). While initially showing promise as a cancer therapeutic, the efficacy of IL-15 was limited by its short in vivo half-life. However, new IL-15-based therapies have been developed and are currently in clinical trials (Robinson & Schluns, Immunol. Lett. 190: 159-168, 2017). The inventors have now shown that IL-15 is not active when fused to an antibody moiety and becomes activated only when released by the cleavage of the linker. Immunocytokines comprising IL-15 localise in vivo to the tumour where they are cleaved. This allows for circumventing the short half-life problem. In addition, the active cytokine is delivered to the site where it is needed, reducing the risks of side effects.

[0107] According to this embodiment, the disclosure relates to a protein complex comprising:
[0108] i) a fusion protein comprising an antibody, or antigen-binding fragment thereof, a cleavable peptide linker, and a cytokine, preferably IL-15, or a functional fragment thereof; and
[0109] ii) a cofactor.

[0110] Cofactors

[0111] The term “cofactor” as used herein refers to a compound which is capable of interacting with the cytokine moiety, such as e.g., IL-15, of the immunocytokine.

[0112] By “interaction” or “interact,” it is meant any type of physical association between proteins, whether covalent or non-covalent. Examples of non-covalent bonds include electrostatic bonds, hydrogen bonds, and Van der Waals forces. Furthermore, the interactions between proteins may either be direct or indirect. Depending upon the type of interaction present, various methods may be used to measure the level of interaction. For example, the strengths of covalent bonds are often measured in terms of the energy required to break a certain number of bonds (i.e., kcal/mol). Non-covalent interactions are often described as above, and also in terms of the distance between the interacting molecules. Indirect interactions may be described in a number of ways, including the number of intermediary agents involved, or the degree of control exercised over the one interacting polypeptide over the other.

[0113] Preferably, the cofactor is capable of binding to the cytokine moiety (e.g., IL-15). By “binding”, “binds”, or the like, it is meant a direct interaction between the cofactor and the immunocytokine, thus forming a complex which is relatively stable under physiological conditions. Methods for determining whether two molecules bind are well known in the art and include, for example, equilibrium dialysis, surface plasmon resonance, and the like. In a particular embodiment, said cofactor thereof, binds to the cytokine moiety with an affinity that is at least two-fold greater than its affinity for binding to a non-specific molecule such as BSA or casein.

[0114] Preferably, the cofactor is a protein or a fragment thereof which is capable of binding the cytokine moiety, such as IL-15. For example, the cofactor may be the physiological receptor for the cytokine, or a cytokine-binding fragment thereof.

[0115] In a preferred aspect, the cofactor is a receptor for IL-15 or an IL-15-binding fragment thereof.

[0116] IL-15 binds and signals through a high affinity receptor, IL-15R, which comprises the IL-2Rβ-chain and IL-2Rγ-chain. These two subunits are also part of the IL-2 receptor (IL-2R). Binding specificity for IL-15 or IL-2 is conferred by a third subunit, i.e. IL-15R alpha-chain (IL-15Rα) or IL-2R alpha-chain, respectively. IL-15Rα is capable of binding IL-15 independently of other subunits.

[0117] Preferably, the cofactor is IL-15Rα or an IL-15-binding fragment thereof.

[0118] As used herein, “IL-15Rα” or “IL-15R alpha-chain” can be any IL-15Rα from any species, such as human or non-human mammalian IL-15Rα or non-mammal IL-15Rα. Exemplary non-human mammals comprise such as pigs, rabbits, monkeys, chimpanzees, mice, and the like; non-mammals comprise such as chickens and the like. Preferably, “IL-15Rα” as used herein refers human IL-15Rα, i.e., a 267-residue polypeptide (Uniprot accession number: Q13261) encoded by the human IL15RA gene ((Gene ID: 3601). “IL-15Rα” as used herein also encompasses all isoforms and variants of this polypeptide, provided they bind to IL-15. Isoforms which do not bind to IL-15 include isoforms 5, 6, 7, and 8, as described on the Uniprot web site. Variants of IL-15Rα which are still capable of binding IL-15 are known in the art (see e.g., EP 3 235 830 A1). IL-15Rα is a transmembrane polypeptide, whose extracellular domain is responsible for binding IL-15. This extracellular domain can be generated by proteolysis shedding of the membrane-anchored receptor.

[0119] The cofactor may also be an IL-15-binding fragment of IL-15Rα, such as a soluble IL-15Rα (sIL-15Rα). As used herein, “soluble IL-15Rα” or “sIL-15Rα” refer to the extracellular domain of IL-15Rα. Preferably, sIL-15Rα has the sequence represented by SEQ ID NO. 53. The sIL-15Rα polypeptide is capable of binding IL-15 independently of other polypeptides. This binding is notably mediated by a specific structural domain, called the sushi domain, present in the IL15Rα extracellular domain. Sushi domain, also known as Complement control protein (CCP) module, or short consensus repeat (SCR), is an evolutionary conserved protein domain characterised by a consensus sequence spanning ˜60 residues containing four invariant cysteine residues forming two disulphide-bridges (I-III and II-IV), a highly conserved tryptophan, and conserved glycine, proline, and hydrophobic residues. ILR15α comprises a unique sushi domain, which is located between residues 31 and 95 of the receptor's extracellular domain. Preferably, the IL-15-binding fragment of IL15Rα comprises the sushi domain present in this receptor. More preferably, the IL-15-binding fragment of IL15Rα consists of the IL-15Rα sushi domain. Even more preferably, the IL-15Rα sushi domain has the sequence represented by SEQ ID NO. 51. Alternatively, the IL-15-binding fragment of IL15Rα provided herein encompasses molecules comprising a sushi domain obtained by one or more amino acid substitutions, insertions or deletions. In particular, the IL-15-binding fragment of IL15Rα may comprise the sushi domain and additional amino acids of IL-15Rα. For example, the IL-15-binding fragment may further comprise at least 5, at least 10, at least 15 additional amino acids of IL-15Rα. More preferably, the IL-15 binding fragment consists of the sushi domain and 11 additional IL15Rα residues. This polypeptide is herein referred to as “sushi+” or “IL-15Rα sushi+”. Specifically, IL-15Rα sushi+ as used herein has the sequence represented by SEQ ID NO. 52.

[0120] Accordingly, the disclosure relates to a protein complex comprising:
[0121] i) a fusion protein comprising an antibody, or antigen-binding fragment thereof, a cleavable peptide linker, and IL-15 or a functional fragment thereof; and
[0122] ii) IL-15Rα or an IL-15-binding fragment thereof,

[0123] wherein the IL-15-binding fragment is selected in the group consisting of: soluble IL-15Rα of SEQ ID NO. 53, IL-15Rα sushi of SEQ ID NO. 51, and IL-15Rα sushi+ of SEQ ID NO. 52.

[0124] The cofactor may be covalently linked to the immunocytokine. In a first embodiment, the cofactor is bound to the immunocytokine by a peptide bond. For example, the cofactor may be expressed in a fusion with the immunocytokine. The cofactor may be linked to the antibody moiety. In such a case, the cofactor may be fused to the same immunoglobulin chain as the cytokine (e.g., IL-15) or a functional fragment thereof, or it may be fused to the other chain. Alternatively, the cofactor may be directly linked to the cytokine, e.g. IL-15, or a functional fragment thereof. This configuration is preferred as it seems to be more favourable to the binding of the cofactor to the cytokine moiety of the immunocytokine.

[0125] According to this embodiment, the present protein complex comprises:
[0126] i) a fusion protein comprising an antibody, or antigen-binding fragment thereof, a cleavable peptide linker, and IL-15 or a functional fragment thereof; and
[0127] ii) IL-15Rα or an IL-15-binding fragment thereof,

[0128] wherein the IL-15-binding fragment is selected in the group consisting of: soluble IL-15Rα of SEQ ID NO. 53, IL-15Rα sushi of SEQ ID NO. 51, and IL-15Rα sushi+ of SEQ ID NO. 52, and

[0129] IL-15Rα or the IL-15-binding fragment thereof covalently linked to the fusion protein, preferably to IL-15 or the functional fragment thereof.

[0130] When the cofactor (e.g. IL-15Rα or an IL-15-binding fragment thereof) is fused to the immunocytokine (e.g., IL-15 or a functional fragment thereof), the cofactor may be separated from the immunocytokine by a linker. Preferably, the peptide linker is an unstructured flexible linker. Without being bound by theory, it is thought that a cofactor may interact more easily and more efficiently with the cytokine moiety, e.g. IL-15, or a functional fragment thereof, when the linker is flexible and does not present any specific structure. Preferably, the linker is not a cleavable linker, as described above. Preferably, the linker mostly comprises glycine and serine residues. In some embodiment, the peptide linker comprises at least 2, at least 3, at least 4, at least 5, at least 10, at least 15, at least 20, at least 25, or at least 30 amino acids. In other embodiments, cleavable peptide linkers are 2-mers (i.e. peptides 2 amino acids in length), 3-mers (i.e. peptides 3 amino acids in length), 4-mers (i.e. peptides 4 amino acids in length), 5-mers (i.e. peptides 5 amino acids in length), 10-mers (i.e. peptides 10 amino acids in length), 15-mers (i.e. peptides 15 amino acids in length), 20-mers (i.e. peptides 20 amino acids in length), 25-mers (i.e. peptides 25 amino acids in length), or 30-mers (i.e. peptides 30 amino acids in length). If the sequence of the linker peptide is too short, the advanced structure folding of two proteins may be affected, and thus interfered with each other; if the sequence of the linker peptide is too long, the problem of immunogenicity is concerned, since the linker peptide sequence itself is a new antigen.

[0131] The cofactor may also be conjugated to the immunocytokine by use of a chemical crosslinker, which results in a protein conjugate that contains two individual polypeptides connected by a crosslinker.

[0132] Alternatively, the cofactor may bind to the immunocytokine through non-covalent interactions. Preferably, the cofactor binds to the cytokine moiety of the immunocytokine through non-covalent interactions. In non-covalent interactions (e.g., electrostatic, hydrogen bonding and Van der Waals interactions), although the interaction energy per unit interaction is quite small (less than 40 kJ/interaction), the cumulative effect of multiple points of interaction along two surfaces can be substantial and can lead to strong binding between two polypeptides. In the present embodiment, the multiple interactions between the cytokine, or functional fragment thereof, and the cofactor ensure the formation of a stable complex which retains its activity when administered in vivo. For example, the combination of IL-15 with sIL-15Rα in solution results in the generation of a complex with high biological potency, the IL-15 superagonist (IL-15 SA), which is undergoing clinical trials as N-803 (Guo et al., Cytokine Growth Factor Rev. 38: 10-21, 2017).

[0133] According to this embodiment, the present protein complex comprises:
[0134] i) a fusion protein comprising an antibody, or antigen-binding fragment thereof, a cleavable peptide linker, and IL-15 or a functional fragment thereof; and
[0135] ii) IL-15Rα or an IL-15-binding fragment thereof,

[0136] wherein the IL-15-binding fragment is selected in the group consisting of: soluble IL-15Rα of SEQ ID NO. 53, IL-15Rα sushi of SEQ ID NO. 51, and IL-15Rα sushi+ of SEQ ID NO. 52, and

[0137] IL-15Rα or the IL-15-binding fragment thereof is linked non-covalently to the fusion protein, preferably to IL-15 or the functional fragment thereof.

[0138] Polynucleotides

[0139] Also provided herein are polynucleotides comprising a nucleotide sequence encoding a fusion protein or a cofactor as described above. Also provided herein are polynucleotides that hybridise under high stringency, intermediate or lower stringency hybridisation conditions, e.g., as defined supra, to polynucleotides that encode a fusion protein or cofactor provided herein.

[0140] In a first aspect, one or more polynucleotides provided herein encode a protein complex wherein the cofactor (e.g., IL-15Rα or an IL-15-binding fragment thereof) is covalently linked to the fusion protein (e.g., an immunocytokine comprising IL-15 or a functional fragment thereof), as described above. In certain embodiments, nucleic acid molecules provided herein comprise or consist of a nucleic acid sequence encoding a V_{H} or a V_{L} amino acid sequence fused to a cleavable peptide linker and a cytokine, notably IL-15, and a cofactor, such as IL-R15α, and optionally a linker, as provided herein. In other embodiments, nucleic acid molecules provided herein comprise or consist of a nucleic acid sequence encoding a V_{H} or a V_{L} amino acid sequence which is not fused to additional sequences. In yet other embodiments, the nucleic acid molecules provided herein comprise or consist of combinations of a nucleic acid sequence encoding a V_{H} or a V_{L} amino acid sequence fused to a cleavable peptide linker and a cytokine, notably IL-15, and a cofactor, such as IL-R15α, and optionally a linker, and of a nucleic acid sequence encoding a V_{H} or a V_{L} amino acid sequence which is not fused to additional sequences. Preferably, a nucleic acid sequence encoding a V_{H} amino acid sequence fused to a cleavable peptide linker and a cytokine, notably IL-15, and a cofactor, such as IL-R15α, and optionally a linker, is combined with a nucleic acid sequence encoding a V_{L} amino acid sequence which is not fused to additional sequences. Alternatively, said combination comprises a nucleic acid sequence encoding a V_{L} amino acid sequence fused to a cleavable peptide linker and a cytokine, notably IL-15, and a cofactor, such as IL-R15α, and optionally a linker, and a nucleic acid sequence encoding a V_{H} amino acid sequence which is not fused to additional sequences.

[0141] In another aspect, the fusion protein and the cofactor encoded by the polynucleotides provided herein interact through non-covalent interactions. In certain embodiments, nucleic acid molecules provided herein comprise or consist of a nucleic acid sequence encoding a V_{H} or a V_{L} amino acid sequence fused to a cleavable peptide linker and a cytokine, as provided herein. In other embodiments, nucleic acid molecules provided herein comprise or consist of a nucleic acid sequence encoding a V_{H} or a V_{L} amino acid sequence which is not fused to additional sequences. In yet other embodiments, nucleic acid molecules provided herein comprise or consist of a nucleic acid sequence encoding a cofactor as described herein. In yet other embodiments, the nucleic acid molecules provided herein comprise or consist of combinations of a nucleic acid sequence encoding a V_{H} or a V_{L} amino acid sequence fused to a cleavable peptide linker and a cytokine, a nucleic acid sequence encoding a VH or a VL amino acid sequence which is not fused to additional sequences, and a nucleic acid sequence encoding a cofactor.

[0142] Preferably, a nucleic acid sequence encoding a V_{H} amino acid sequence fused to a cleavable peptide linker and a cytokine is combined with a nucleic acid sequence encoding a V_{L} amino acid sequence which is not fused to additional sequences and with a nucleic acid sequence encoding the cofactor. Alternatively, said combination comprises a nucleic acid sequence encoding a V_{L} amino acid sequence fused to a cleavable peptide linker and a cytokine and a nucleic acid sequence encoding a V_{H} amino acid sequence which is not fused to additional sequences and a nucleic acid sequence encoding the cofactor.

[0143] Recombinant Expression of a Protein Complex

[0144] A variety of expression systems may be used to express the present protein complex as described herein. The skilled person will be able to choose an expression system appropriate for expressing the immunocytokine and cofactor described herein, either as a fusion (i.e. when the cofactor is covalently linked to the immunocytokine) or by coexpression (i.e. when the immunocytokine and the cofactor are bound non-covalently). The expression of the cofactor with the immunocytokine, be they covalently or non-covalently bound, leads to higher yields and lower levels of aggregation (i.e., a higher purity) of the immunocytokine than expression of the immunocytokine alone.

[0145] In one aspect, such expression systems represent vehicles by which the coding sequences of interest may be produced and subsequently purified, but also represent cells which may, when transiently transfected with the appropriate nucleotide coding sequences, express the protein complex in situ.

[0146] The invention provides vectors comprising the polynucleotides described herein. In one embodiment, the vector contains a polynucleotide encoding a heavy chain of the immunocytokine provided herein, wherein said heavy chain is fused or not to a cleavable peptide linker and a cytokine. In this embodiment, the immunocytokine may be fused or not to the cofactor. In another embodiment, said polynucleotide encodes the light chain of an immunocytokine of the invention, wherein said light chain is fused or not to a cleavable peptide linker and a cytokine. In this embodiment, the immunocytokine may be fused or not to the cofactor. In yet another embodiment, the polynucleotide encodes the cofactor. The present disclosure also provides vectors comprising polynucleotide molecules encoding fusion proteins, modified antibodies, antibody fragments, and probes thereof.

[0147] In order to express the heavy and/or light chain of an immunocytokine and/or the cofactor disclosed herein, the polynucleotides encoding said heavy and/or light chains and/or cofactor are inserted into expression vectors such that the genes are operatively linked to transcriptional and translational sequences.

[0148] “Operably linked” sequences include both expression control sequences that are contiguous with the gene of interest and expression control sequences that act in trans or at a distance to control the gene of interest. The term “expression control sequence” as used herein refers to polynucleotide sequences which are necessary to effect the expression and processing of coding sequences to which they are ligated. Expression control sequences include appropriate transcription initiation, termination, promoter and enhancer sequences; efficient RNA processing signals such as splicing and polyadenylation signals; sequences that stabilize cytoplasmic mRNA; sequences that enhance translation efficiency (i.e., Kozak consensus sequence); sequences that enhance protein stability; and when desired, sequences that enhance protein secretion. The nature of such control sequences differs depending upon the host organism; in prokaryotes, such control sequences generally include promoter, ribosomal binding site, and transcription termination sequence; in eukaryotes, generally, such control sequences include promoters and transcription termination sequence. The term “control sequences” is intended to include, at a minimum, all components whose presence is essential for expression and processing and can also include additional components whose presence is advantageous, for example, leader sequences and fusion partner sequences.

[0149] The term “vector”, as used herein, is intended to refer to a nucleic acid molecule capable of transporting another nucleic acid to which it has been linked. One type of vector is a “plasmid”, which refers to a circular double stranded DNA loop into which additional DNA segments may be ligated. Another type of vector is a viral vector, wherein additional DNA segments may be ligated into the viral genome. Certain vectors are capable of autonomous replication in a host cell into which they are introduced (e.g., bacterial vectors having a bacterial origin of replication and episomal mammalian vectors). Other vectors (e.g., non-episomal mammalian vectors) can be integrated into the genome of a host cell upon introduction into the host cell, and thereby are replicated along with the host genome.

[0150] Certain vectors are capable of directing the expression of genes to which they are operatively linked. Such vectors are referred to herein as “recombinant expression vectors” (or simply, “expression vectors”). In general, expression vectors of utility in recombinant DNA techniques are in the form of plasmids. In the present specification, “plasmid” and “vector” may be used interchangeably as the plasmid is the most commonly used form of vector. However, the invention is intended to include such forms of expression vectors, such as bacterial plasmids, YACs, cosmids, retrovirus, EBV-derived episomes, and all the other vectors that the one skilled in the art will know to be convenient for ensuring the expression of the heavy and/or light chains and/or cofactor of the invention. The skilled man will realise that the polynucleotides encoding the heavy and the light chains and the cofactor can be cloned into different vectors or in the same vector. In a preferred embodiment, said polynucleotides are cloned into at least two vectors. In particular, when the immunocytokine and the cofactor are expressed as a fusion, said polynucleotides are preferably cloned in at least two vectors. When the immunocytokine and the cofactor are co-expressed, i.e. not as a fusion, said polynucleotides are preferably cloned in at least one, preferably at least two, preferably three vectors.

[0151] Polynucleotides of the invention and vectors comprising these molecules can be used for the transformation of a suitable host cell. The term “host cell”, as used herein, is intended to refer to a cell into which a recombinant expression vector has been introduced in order to express the present protein complex. It should be understood that such terms are intended to refer not only to the particular subject cell but also to the progeny of such a cell. Because certain modifications may occur in succeeding generations due to either mutation or environmental influences, such progeny may not, in fact, be identical to the parent cell, but are still included within the scope of the term “host cell” as used herein.

[0152] Transformation can be performed by any known method for introducing polynucleotides into a cell host. Such methods are well known of the man skilled in the art and include dextran-mediated transformation, calcium phosphate precipitation, polybrene-mediated transfection, protoplast fusion, electroporation, encapsulation of the polynucleotide into liposomes, biolistic injection and direct microinjection of DNA into nuclei.

[0153] The host cell may be co-transfected with two or more expression vectors, including the vector expressing the protein complex described herein. In particular, the other expression vectors may encode enzymes involved in post-translational modifications, such as glycosylation. For example, a host cell can be transfected with a first vector encoding protein complex as described above, and a second vector encoding a glycosyltransferase polypeptide. Alternatively, the host cell can be transformed with a first vector encoding a protein complex, a second vector encoding a glycosyltransferase, as described above, and a third vector encoding another glycosyltransferase. Mammalian cells are commonly used for the expression of a recombinant therapeutic immunoglobulins, especially for the expression of whole recombinant antibodies. For example, mammalian cells such as HEK293 or CHO cells, in conjunction with a vector, containing the expression signal such as one carrying the major intermediate early gene promoter element from human cytomegalovirus, are an effective system for expressing the present protein complex (Foecking et al., 1986, Gene 45:101-105; Cockett et al., 1990, Bio/Technology 8(7):662-667).

[0154] It is also possible to select a host cell which modulates the expression of the inserted sequences or modifies and processes the gene product in the specific fashion desired. Such modifications (e.g., glycosylation) and processing of protein products may be important for the function of the protein. Different host cells have features and specific mechanisms for the post-translational processing and modification of proteins and gene products. Appropriate cell lines or host systems are chosen to ensure the correct modification and processing of the expressed proteins of interest (i.e., the immunocytokine and the cofactor provided herein). Hence, eukaryotic host cells which possess the cellular machinery for proper processing of the primary transcript, glycosylation of the gene product may be used. Such mammalian host cells include, but are not limited to, CHO, COS, HEK293, NS/0, BHK, Y2/0, 3T3 or myeloma cells (all these cell lines are available from public depositories such as the Collection Nationale des Cultures de Microorganismes, Paris, France, or at the American Type Culture Collection, Manassas, Va., U.S.A.).

[0155] For long-term, high-yield production of recombinant proteins, stable expression is preferred. In one embodiment of the invention, cell lines which stably express the immunocytokine and the cofactor may be engineered. Rather than using expression vectors which contain viral origins of replication, host cells are transformed with DNA under the control of the appropriate expression regulatory elements, including promoters, enhancers, transcription terminators, polyadenylation sites, and other appropriate sequences known to the person skilled in art, and a selectable marker. Following the introduction of the foreign DNA, engineered cells may be allowed to grow for one to two days in an enriched media, and then are moved to a selective media. The selectable marker on the recombinant plasmid confers resistance to the selection and allows cells to stably integrate the plasmid into a chromosome and be expanded into a cell line. Other methods for constructing stable cell lines are known in the art. In particular, methods for site-specific integration have been developed. According to these methods, the transformed DNA under the control of the appropriate expression regulatory elements, including promoters, enhancers, transcription terminators, polyadenylation sites, and other appropriate sequences is integrated in the host cell genome at a specific target site which has previously been cleaved (Moele et al., Proc. Natl. Acad. Sci. U.S.A., 104(9): 3055-3060; U.S. Pat. Nos. 5,792,632; 5,830,729; 6,238,924; WO 2009/054985; WO 03/025183; WO 2004/067753, all of which are incorporated herein by reference).

[0156] A number of selection systems may be used, including but not limited to the Herpes simplex virus thymidine kinase (Wigler et al., Cell 11:223, 1977), hypoxanthine-guanine phosphoribosyltransferase (Szybalska et al., Proc. Natl. Acad. Sci. USA 48:202, 1992), glutamate synthase selection in the presence of methionine sulfoximide (Adv Drug Del Rev, 58:671, 2006, and website or literature of Lonza Group Ltd.) and adenine phosphoribosyltransferase (Lowy et al., Cell 22:817, 1980) genes in tk, hgprt or aprt cells, respectively. Also, antimetabolite resistance can be used as the basis of selection for the following genes: dhfr, which confers resistance to methotrexate (Wigler et al., Proc Natl Acad Sci USA 77: 357, 1980); gpt, which confers resistance to mycophenolic acid (Mulligan et al., Proc Natl Acad Sci USA 78: 2072, 1981); neo, which confers resistance to the aminoglycoside, G-418 (Wu et al., Biotherapy 3: 87, 1991); and hygro, which confers resistance to hygromycin (Santerre et al., Gene 30: 147, 1984). Methods known in the art of recombinant DNA technology may be routinely applied to select the desired recombinant clone, and such methods are described, for example, in Ausubel et al., eds., Current Protocols in Molecular Biology, John Wiley & Sons (1993). The expression levels of an immunocytokine and/or cofactor can be increased by vector amplification. When a marker in the vector system expressing an immunocytokine and/or cofactor is amplifiable, an increase in the level of inhibitor present in the culture will increase the number of copies of the marker gene. Since the amplified region is associated with the gene encoding the immunocytokine and/or cofactor of interest, production of said immunocytokine and/or cofactor will also increase (Crouse et al., Mol Cell Biol 3: 257-266, 1983). Alternative methods of expressing the gene of the invention exist and are known to the person of skills in the art. For example, a modified zinc finger protein can be engineered that is capable of binding the expression regulatory elements upstream of the gene of the invention; expression of the said engineered zinc finger protein (ZFN) in the host cell of the invention leads to increases in protein production (see e.g., Reik et al., Biotechnol. Bioeng., 97(5), 1180-1189, 2006). Moreover, ZFN can stimulate the integration of a DNA into a predetermined genomic location, resulting in high-efficiency site-specific gene addition (Moehle et al, Proc Natl Acad Sci USA 104:3055-3060, 2007).

[0157] The protein complex of the invention may be prepared by growing a culture of the transformed host cells under culture conditions necessary to express the desired immunocytokine and cofactor, as a fusion or not as described above. The resulting expressed complex may then be purified from the culture medium or cell extracts. Soluble forms of the complex can be recovered from the culture supernatant. It may then be purified by any method known in the art for purification of an immunoglobulin molecule, for example, by chromatography (e.g., ion exchange, affinity, particularly by Protein A affinity for Fc, and so on), centrifugation, differential solubility or by any other standard techniques for the purification of proteins. Suitable methods of purification will be apparent to a person of ordinary skills in the art.

[0158] Pharmaceutical Compositions

[0159] When addressed to the tumour site, the immunocytokines provided herein in a complex with a cofactor are cleaved, thus releasing a cytokine such as IL-15, which has anti-tumour activity. In addition, some of the antibody moieties are capable of inducing ADCC and/or CDC responses and/or have an intrinsic anti-tumour activity. It will thus be appreciated by the skilled person that the protein complexes of immunocytokines and cofactors provided herein are useful in the treatment of metastatic tumours and diseases such as cancer.

[0160] The terms “treating” or “treatment” refer to administering or the administration of a composition described herein in an amount, manner, and/or mode effective to improve a condition, symptom, or parameter associated with a disorder or to prevent progression or exacerbation of the disorder (including secondary damage caused by the disorder) to either a statistically significant degree or to a degree detectable to one skilled in the art.

[0161] Another aspect of the invention relates to pharmaceutical compositions of the immunocytokines in a complex with a cofactor, as described herein.

[0162] The pharmaceutical composition of the invention may contain, in addition to the protein complex of immunocytokine and cofactor, various diluents, fillers, salts, buffers, stabilizers, solubilisers, and other materials well known in the art.

[0163] As used herein, “pharmaceutically acceptable carrier” includes any and all solvents, buffers, salt solutions, dispersion media, coatings, antibacterial and antifungal agents, isotonic and absorption delaying agents, and the like that are physiologically compatible. The type of carrier can be selected based upon the intended route of administration. In various embodiments, the carrier is suitable for intravenous, intraperitoneal, subcutaneous, intramuscular, topical, transdermal or oral administration. Pharmaceutically acceptable carriers include sterile aqueous solutions or dispersions and sterile powders for the extemporaneous preparation of sterile injectable solutions or dispersion. The use of media and agents for pharmaceutically active substances is well known in the art. As detailed below, additional active compounds can also be incorporated into the compositions, such as anti-cancer and/or anti-angiogenesis agents; in particular, the additional active compound can be an anti-angiogenic agent, a chemotherapeutic agent, or a low-molecular weight agent. A typical pharmaceutical composition for intravenous infusion could be made up to contain 250 ml of sterile Ringer's solution, and 100 mg of the protein complex. Actual methods for preparing parenterally administrable compounds will be known or apparent to those skilled in the art and are described in more detail in for example, Remington's Pharmaceutical Science, 17th ed., Mack Publishing Company, Easton, Pa. (1985), and the 18^{th} and 19^{th} editions thereof, which are incorporated herein by reference.

[0164] The protein complex of immunocytokine and cofactor present in the composition preferably is formulated in an effective amount. An “effective amount” refers to an amount effective, at dosages and for periods of time necessary, to achieve the desired result, such as induction of apoptosis in tumour cells. A “therapeutically effective amount” means an amount sufficient to influence the therapeutic course of a particular disease state. A therapeutically effective amount is also one in which any toxic or detrimental effects of the agent are outweighed by the therapeutically beneficial effects.

[0165] For therapeutic applications, the protein complex is administered to a mammal, preferably a human, in a pharmaceutically acceptable dosage form such as those discussed above, including those that may be administered to a human intravenously as a bolus or by continuous infusion over a period of time, by intramuscular, intraperitoneal, intracerebrospinal, subcutaneous, intraarticular, intrasynovial, intrathecal, oral, topical, or inhalation routes. The protein complex is also suitably administered by intratumoural, peritumoural, intralesional, or perilesional routes, to exert local as well as systemic therapeutic effects. The intraperitoneal route is expected to be particularly useful, for example, in the treatment of ovarian tumours. Dosage regimens may be adjusted to provide the optimum response. For example, a single bolus may be administered, several divided doses may be administered over time, or the dose may be proportionally reduced or increased. One skilled in the art in the field of preparing formulations can readily select the proper form and mode of administration depending upon the particular characteristics of the product selected, the disease or condition to be treated, the stage of the disease or condition and other relevant circumstances

[0166] The present compositions can be administered to a subject to effect cell growth activity in a subject. As used herein, the term “subject” is intended to include living organisms in which apoptosis can be induced, and specifically includes mammals, such as rabbits, dogs, cats, mice, rats, monkey transgenic species thereof, and preferably humans. A human subject may be called a “patient”.

[0167] The effectiveness of the protein complex of immunocytokine and cofactor in preventing or treating cancer may be improved by administering said protein complex serially or in combination with another agent that is effective for those purposes, such as tumour necrosis factor (TNF), an antagonist capable of inhibiting or neutralising the angiogenic activity of acidic or basic fibroblast growth factor (FGF), platelet-derived growth factor (PDGF), or hepatocyte growth factor (HGF), an antagonist capable of inhibiting or neutralising the coagulant activities of tissue factor, protein C, or protein S (see WO 91/01753), an antagonist such as an antibody capable of binding to HER2 receptor (see U.S. Pat. No. 5,772,997), or one or more conventional therapeutic agents such as, for example, alkylating agents, folic acid antagonists, anti-metabolites of nucleic acid metabolism, antibiotics, pyrimidine analogs, 5-fluorouracil, cisplatin, purine nucleosides, amines, amino acids, triazol nucleosides, or corticosteroids.

[0168] In addition, the pharmaceutical composition may also comprise another agent which is capable of modulating immune cell, notably T cell or monocyte, activation and/or function. In particular, the pharmaceutical composition may further comprise a therapeutically effective amount of an antagonist to a co-inhibitory molecule. In some embodiments, the co-inhibitory molecule is selected from the group consisting of CD86, CD80, PDL-1, PDL-2, CTLA-4, PD1, LAG3, BTNL2, B7-H3, B7-H4, a butyrophilin, CD48, CD244, TIM-3, CD200R, CD200, CD160, BTLA, HVEM, LAIR1, TIM1, Galectin 9, TIM3, CD48, 2B4, CD155, CD112, CD113 and TIGIT. The antagonist to the co-inhibitory molecule includes an antibody against the co-inhibitory molecule. It is recognised that antagonist to other co-inhibitory molecules are well known in the art, such as those described in Mercier et al., Frontiers in Immunology, 6:418 (2015), Kyi et al., FEBS Letters, 588:368-376 (2014) and Pardoll, Nature Reviews, 12:252-264 (2012). In some other embodiments, the pharmaceutical composition described herein further comprises a therapeutically effective amount of an agonist to a co-stimulatory molecule. In some embodiments, the co-stimulatory molecule is selected from the group consisting of CD154, TNFRSF25, GITR, 4-1BB, OX40, CD27, TMIGD2, ICOS, CD28, CD40, TL1A, GITRL, 41BBL, OX40L, CD70, HHLA2, ICOSL, a cytokine, LIGHT, HVEM, CD30, CD30L, B7-H2, CD80, CD86, CD40L, TIM4, TIM1, SLAM, CD48, CD58, CD155, CD112, DR3, GITR, CD2, and CD226. The agonist to the co-stimulatory molecule includes an agonistic antibody against the co-stimulatory molecule. It is recognised that agonists to co-stimulatory molecules are well known in the art, such as those described in Mercier et al., Frontiers in Immunology, 6:418 (2015), Kyi et al., FEBS Letters, 588:368-376 (2014) and Capece et al., J. Biomed. Biotechnol. 2012:926321, (2012).

[0169] In another aspect of the invention, the administration is combined with an administration of therapeutically effective amount of chemotherapeutic agent, such as for example, taxol (paclitaxel) or taxotere (docetaxel).

[0170] Chemotherapeutic agents include without any limitations, anti-microtubule agents such as diterpenoids and vinca alkaloids; platinum coordination complexes; alkylating agents such as nitrogen mustards, oxazaphosphorines, alkylsulfonates, nitrosoureas, and triazenes; antibiotic agents such as anthracyclins, actinomycins and bleomycins; topoisomerase II inhibitors such as epipodophyllotoxins; antimetabolites such as purine and pyrimidine analogues and antifolate compounds; topoisomerase I inhibitors such as camptothecins; hormones and hormonal analogues; signal transduction pathway inhibitors; non-receptor tyrosine kinase angiogenesis inhibitors; immunotherapeutic agents; proapoptotic agents; and cell cycle signalling inhibitors. In addition, the methods of the invention can be combined with another anti-cancer treatment, anti-angiogenic agent, or chemotherapeutic agent or radiation therapy. A preferred example is docetaxel or taxotere. Other examples include, gemcitabine, cisplatin diterpenoids and vinca alkaloids, paclitaxel, vinblastine, vincristine, and vinorelbine, carboplatin, cyclophosphamide, melphalan, and chlorambucil, busulfan, carmustine, dacarbazine, cyclophosphamide, melphalan, chlorambucil, busulfan, carmustine, dacarbazine, anti-neoplastic agents including, but not limited to, actinomycins such as dactinomycin, anthrocyclins such as daunorubicin and doxorubicin, bleomycins, epipodophyllotoxins, etoposide and teniposide; antimetabolite neoplastic agents, 5-fluorouracil, methotrexate, cytarabine, mecaptopurine, thioguanine, camptothecins, irinotecan HCl, and topotecan HCl.

[0171] A variety of different chemotherapeutic agents or anti-cancer polypeptides can also be selected. Information sources such as www.clinicaltrials.gov, www.ncbi.nlm.nih and www.drugs.com, include references to polypeptides and agents that can be selected.

[0172] Methods of Modulating an Immune Response

[0173] The protein complex provided herein can be used to modulate an immune response, since a cytokine is released when the linker is cleaved and may then activate specific immune cells. For example, IL-15 regulates the expansion of lymphocyte subsets; notably, IL-15 primarily stimulates the proliferation and cytotoxic functions of CD8⁺ T cells and NK cells. Indeed, administration of the protein complex disclosed herein results in enhance proliferation of NK cells in the tumour microenvironment. In addition, the present immunocytokine is able to stimulate T cell activation in vivo when cleaved, but not in the uncleaved form.

[0174] The present disclosure thus relates to the protein complex disclosed herein or a pharmaceutical composition comprising said complex for use in stimulating an immune response in a subject.

[0175] The present disclosure also relates to a method for stimulating an immune response in a subject, comprising administering to the subject the protein complex disclosed herein or a pharmaceutical composition comprising said complex.

[0176] Also provided herein is the use of the protein complex disclosed herein or a pharmaceutical composition comprising said complex for making a medicament for stimulating an immune response in a subject.

[0177] The term “immune response” as used herein is meant to refer to the process whereby immune cells are stimulated and recruited from the blood to lymphoid as well as non-lymphoid tissues via a multifactorial process that involves distinct adhesive and activation steps. Activation conditions cause the release of cytokines, growth factors, chemokines and other factors, upregulate expression of adhesion and other activation molecules on the immune cells, promote adhesion, morphological changes, and/or extravasation concurrent with chemotaxis through the tissues, increase cell proliferation and cytotoxic activity, stimulate antigen presentation and provide other phenotypic changes including generation of memory cell types. Immune response if also meant to refer to the activity of immune cells to suppress or regulate inflammatory or cytotoxic activity of other immune cells. Exemplary immune responses include B cell responses (e.g., antibody production) T cell responses (e.g., cytokine production, and cellular cytotoxicity) and activation of cytokine responsive cells, e.g., NK cells and macrophages.

[0178] The protein complexes described herein are useful to expand lymphocyte subsets, such as specific T/NK subsets. The present invention thus relates to the use of a product of the invention as an agent for expanding one or several lymphocyte populations, such as NK cells, NK-T cells, CD8⁺ T cells, and to the adjuvants, compositions and kits intended for such a use, including the pharmaceutical compositions and drugs, which comprise at least one product of the invention.

[0179] The present disclosure thus relates to the protein complex disclosed herein or a pharmaceutical composition comprising said complex for use in stimulating an immune response in a mammal, wherein the immune response involves expanding one or several lymphocyte populations, such as NK cells, NK-T cells, CD8⁺ T cells.

[0180] The present disclosure also relates to a method for stimulating an immune response in a mammal, wherein the immune response involves expanding one or several lymphocyte populations, such as NK cells, NK-T cells, CD8⁺ T cells, the method comprising administering to the mammal the protein complex disclosed herein or a pharmaceutical composition comprising said complex.

[0181] Activation of lymphocyte expansion by release of IL-15 from the protein complex as a means of stimulating an immune response is useful in therapy.

[0182] Stimulation of immune responses can be in the form of enhancing an existing immune response or eliciting an initial immune response. For example, enhancing an immune response through activation of lymphocyte expansion is useful in cases of infections with microbes, e.g., bacteria, viruses, or parasites, or in cases of immunosuppression. Activation of lymphocyte expansion by release of IL-15 from the protein complex can also be useful in the treatment of tumour immunity. Tumour cells (e.g., colorectal cancer, sarcoma, melanoma, lymphoma, leukaemia, neuroblastoma, or carcinoma) can be contacted in vitro or in vivo with the present protein complex, thereby releasing the cytokine, e.g. IL-15, from said complex. If desired, the tumour cells can also be transfected with other polypeptides which stimulate immune responses (e.g., antibodies against immune checkpoints such as PD-1, PD-L1, or VISTA).

[0183] Methods of Treatment

[0184] The protein complexes of immunocytokines and cofactors and the pharmaceutical compositions described herein are especially useful in the treatment or prevention of several types of cancers.

[0185] Another aspect of the present disclosure thus relates to the protein complex of immunocytokine and cofactor described herein for use in the treatment of cancer. It also relates to a method of treating cancer in a subject in need thereof, comprising administering a therapeutically effective amount of the protein complex described herein to the subject.

[0186] The disclosure also relates to a pharmaceutical composition comprising the protein complex described herein for use in the treatment of cancer. It also relates to a method of treating cancer in a subject in need thereof, comprising administering a pharmaceutical composition comprising a therapeutically effective amount of the protein complex described herein to the subject.

[0187] The cancers which may be treated by this protein complex of immunocytokine and cofactor are cancers in which the antigen recognised by the antibody moiety of the immunocytokine is expressed. These cancers include (but not limited to) the following: carcinomas and adenocarcinomas, including that of the bladder, breast, colon, head-and-neck, prostate, kidney, liver, lung, ovary, pancreas, stomach, cervix, thyroid and skin, and including squamous cell carcinoma; hematopoietic tumours of lymphoid lineage, including multiple myeloma, leukaemia, acute and chronic lymphocytic (or lymphoid) leukaemia, acute and chronic lymphoblastic leukaemia, B-cell lymphoma, T-cell lymphoma, non-Hodgkin lymphoma (e.g. Burkitt's lymphoma); hematopoietic tumours of myeloid lineage, including acute and chronic myelogenous (myeloid or myelocytic) leukaemia, and promyelocytic leukaemia; tumours of mesenchymal origin, including fibrosarcoma, osteosarcoma and rhabdomyosarcoma; tumours of the central and peripheral nervous system, including astrocytoma, neuroblastoma, glioma, and schwannomas; and other tumours, including melanoma, teratocarcinoma, xeroderma pigmentosum, keratoacanthoma, and seminoma, and other cancers yet to be determined in which said antigen is expressed. By cancers in which the antigen recognised by the antibody moiety of the immunocytokine is expressed, it is herein referred to cancers displaying high expression of said antigen, relative to the expression level of said antigen on a normal adult cell.

[0188] Other agents described above, e.g. anti-angiogenic agents or chemotherapeutic agents may be present in the composition being administered or may be administered separately. In one aspect of the invention, the administration is performed with the other active principle, either simultaneously, separately or sequentially over time. When the administration is performed simultaneously, the two active principles may be combined in a single pharmaceutical composition, comprising the two compositions, such as a tablet or a gel capsule. On the other hand, the two active principles may, whether or not they are administered simultaneously, be present in separate pharmaceutical compositions. To this end, the combination may be in the form of a kit comprising, on the one hand, the protein complex of immunocytokine and cofactor described herein and, on the other hand, the second active principle, the protein complex described herein and the second active principle being in separate compartments and being intended to be administered simultaneously, separately, or sequentially over time.

[0189] The present protein complex of immunocytokine and cofactor can be administered especially for treating cancer in combination with chemotherapy, protein therapy (i.e., using a therapeutic agent such as an antibody or recombinant protein), gene therapy, radiotherapy, immunotherapy, surgical intervention, or a combination of these. Long-term therapy is equally possible as is adjuvant therapy in the context of other treatment strategies, as described above.

[0190] Cytokines such as IL-15 are required for NK cell activation and proliferation. They are also capable of stimulating tumour-specific T cell responses that are highly-specific. For example, administration of IL-15 induces the selective activation and proliferation in CD8 T cells and NK cells, the very cell types most amenable to mediating anti-tumour responses (Waldmann, J Investig Dermatol Symp Proc. 16(1): S28-30, 2013).

[0191] In some embodiments, the protein complex of immunocytokine and cofactor can be used in a method of modulating immune cell function, mediated by binding of the cytokine moiety, preferably IL-15, of the immunocytokine. Preferably, the immune cell is a T cell or a monocyte. Such methods can include contacting the immune cell, preferably a T cell or a monocyte, with the immunocytokine of the protein complex described herein. In some embodiments, the method for modulating the immune cell (notably T cell or monocyte) function includes administering an effective amount of a composition comprising the protein complex of immunocytokine and cofactor provided herein to a subject. In some aspects, the T cell function that is modulated includes increasing T cell activation. Such T cell activation can further include increasing T cell proliferation. In some aspects, the monocyte function that is modulated includes increasing secretion of anti-cancer cytokines. Methods for assaying the modulation of an immune response are well known to one of skill in the art, and it is understood that a skilled artisan would be able to readily conduct such assays.

[0192] In some embodiments, a protein complex comprising immunocytokine and cofactor or a composition comprising this protein complex, including as described herein, can be used either alone or in combination with another compound or treatment. For example, in some embodiments, the other compound is an antagonist to a co-inhibitory molecule or an agonist to a co-stimulatory molecule. In such embodiments, the combined therapy leads to reinvigoration or de novo activation of the immune system through activated T cells that is greater than the administration of either compound or treatment individually. This activation of the immune system will result in a highly beneficial physiological response in the treatment of cancer.

[0193] In some embodiments, the methods described herein can include administering a therapeutically effective amount of a protein complex comprising immunocytokine and cofactor, in combination with a therapeutically effective amount of an antagonist to a co-inhibitory molecule. In some embodiments, the co-inhibitory molecule is selected from the group consisting of CD86, CD80, PDL-1, PDL-2, CTLA-4, PD1, LAG3, BTNL2, B7-H3, B7-H4, a butyrophilin, CD48, CD244, TIM-3, CD200R, CD200, CD160, BTLA, HVEM, LAIR1, TIM1, Galectin 9, TIM3, CD48, 2B4, CD155, CD112, CD113 and TIGIT. The antagonist to the co-inhibitory molecule includes an antibody against the co-inhibitory molecule. It is recognised that antagonist to other co-inhibitory molecules are well known in the art, such as those described in Mercier et al., Frontiers in Immunology, 6:418 (2015), Kyi et al., FEBS Letters, 588:368-376 (2014) and Pardoll, Nature Reviews, 12:252-264 (2012). According to this embodiment, the invention relates to a protein complex comprising immunocytokine and cofactor for use in treatment of cancer as described above, said use further comprising the administration of an antagonist to a co-inhibitory molecule, wherein said co-inhibitory molecule is selected from the group consisting of CD86, CD80, PDL-1, PDL-2, CTLA-4, PD1, LAG3, BTNL2, B7-H3, B7-H4, a butyrophilin, CD48, CD244, TIM-3, CD200R, CD200, CD160, BTLA, HVEM, LAIR1, TIM1, Galectin 9, TIM3, CD48, 2B4, CD155, CD112, CD113 and TIGIT.

[0194] In some embodiments, the methods described herein can include administering a therapeutically effective amount of a protein complex of immunocytokine and cofactor in combination with a therapeutically effective amount of an agonist to a co-stimulatory molecule. In some embodiments, the co-stimulatory molecule is selected from the group consisting of CD154, TNFRSF25, GITR, 4-1BB, OX40, CD27, TMIGD2, ICOS, CD28, CD40, TL1A, GITRL, 41BBL, OX40L, CD70, HHLA2, ICOSL, a cytokine, LIGHT, HVEM, CD30, CD30L, B7-H2, CD80, CD86, CD40L, TIM4, TIM1, SLAM, CD48, CD58, CD155, CD112, DR3, GITR, CD2, and CD226. The agonist to the co-stimulatory molecule includes an agonistic antibody against the co-stimulatory molecule. It is recognised that agonists to co-stimulatory molecules are well known in the art, such as those described in Mercier et al., Frontiers in Immunology, 6:418 (2015), Kyi et al., FEBS Letters, 588:368-376 (2014) and Capece et al., J. Biomed. Biotechnol. 2012:926321, (2012). According to this embodiment, the invention relates to a protein complex comprising immunocytokine and cofactor for use in treatment of cancer as described above, said use further comprising the administration of an agonist to a co-stimulatory molecule, wherein said co-stimulatory molecule is selected from the group consisting of CD154, TNFRSF25, GITR, 4-1BB, OX40, CD27, TMIGD2, ICOS, CD28, CD40, TL1A, GITRL, 41BBL, OX40L, CD70, HHLA2, ICOSL, a cytokine, LIGHT, HVEM, CD30, CD30L, B7-H2, CD80, CD86, CD40L, TIM4, TIM1, SLAM, CD48, CD58, CD155, CD112, DR3, GITR, CD2, and CD226.

[0195] The examples that follow are merely exemplary of the scope of this invention and content of this disclosure. One skilled in the art can devise and construct numerous modifications to the examples listed below without departing from the scope of this invention.

[0196] The examples that follow are merely exemplary of the scope of this invention and content of this disclosure. One skilled in the art can devise and construct numerous modifications to the examples listed below without departing from the scope of this invention.

### EXAMPLES

### Example 1: Sequences of the Constructions

[0197] 1. Sequences

TABLE 1
Antibodies variable regions.

| | HC | HC | LC | HC |
|---|---|---|---|---|
| | (variable | (variable | (variable | (variable |
| | region): | region): | region): | region): |
| SEQ ID NO: | DNA | protein | DNA | protein |
| Anti-PDL1 | 1 | 2 | 3 | 4 |
| H16/L16 | 5 | 6 | 7 | 8 |
| NHS76 | 9 | 10 | 11 | 12 |
| C9G4 | 13 | 14 | 15 | 16 |

TABLE 2
Constant regions.

| SEQ ID NO: | DNA | Protein |
|---|---|---|
| Human IgG1Δκ | 17 | 18 |
| Human IgG4Δκ | 19 | 20 |
| Human Kappa constant | 21 | 22 |
| Human Lambda constant | 23 | 24 |

[0198] Similar results were obtained with a human IgG1 instead of a human IgG1ΔK.

TABLE 3
Full-length antibody chains

| | Light chain: full-length | | Heavy chain: full-length | |
|---|---|---|---|---|
| SEQ ID NO. | DNA | Protein | DNA | Protein |
| hH16L16_LhK | 53 | 54 | | |
| m9g4_LhK | 187 | 188 | | |
| hNHS76_LhL | 55 | 56 | | |
| hH16L16_IgG1dK | | | 189 | 190 |
| hH16L16_IgG4PdK | | | 191 | 192 |
| m9G4_IgG1dK | | | 193 | 194 |
| m9G4_IgG4PdK | | | 195 | 196 |
| hNHS76_IgG1dK | | | 197 | 198 |
| hNHS76_IgG4PdK | | | 199 | 200 |

TABLE 4
Cytokines.

| SEQ ID NO: | DNA | Protein |
|---|---|---|
| Human IL-15 | 25 | 26 |
| Human IL-2 | 27 | 28 |
| Human CCL4 | 29 | 30 |
| Human INFα2a | 31 | 32 |
| NanoLuc ® | 33 | 34 |
| Human IL-36γ | 171 | 172 |

TABLE 5
Linkers.

| SEQ ID NO: | DNA | Protein |
|---|---|---|
| L1 | 35 | 36 |
| L2 | 37 | 38 |
| L3 | 39 | 40 |
| L4 | 41 | 42 |
| L5 | 43 | 44 |
| L6 | 45 | 46 |
| L7 | 165 | 166 |
| L8 | 167 | 168 |
| L9 | 169 | 170 |
| L6-L6 | 201 | 202 |
| Nc30 | 203 | 204 |

TABLE 6
Cloning sites (for some NanoLuc ® constructions, two amino acids
were added to create a new and necessary restriction site).

| SEQ ID NO: | DNA | Protein |
|---|---|---|
| Cloning site | 47 | 48 |

TABLE 7
Cofactors

Cofactors

| SEQ ID NO. | DNA | Protein |
|---|---|---|
| sushi | 205 | 206 |
| sushi+ | 207 | 208 |
| sIL-15Rα | 209 | 210 |

TABLE 8
ICC.

| SEQ ID NO: | DNA | Protein |
|---|---|---|
| HC: H16/L16-PVGLIG-IL-15 | 49 | 50 |
| HC: NHS76-PVGLIG-hIL-15 | 51 | 52 |
| H16/L16-PVGLIG-hIL-15 | HC: 49 | HC: 50 |
| | LC: 53 | LC: 54 |
| NHS76-PVGLIG-hIL-15 | HC: 51 | HC: 52 |
| | LC: 55 | LC: 56 |

TABLE 8
ICC - full constructs.

| | | |
|---|---|---|
| SEQ ID NO: | DNA | Protein |

Single linker

| | | | |
|---|---|---|---|
| PDL1-GPLGMLSQ-NanoLuc | C-term HC | 57 | 58 |
| | C-term LC | 59 | 60 |
| | N-term HC | 61 | 62 |
| | N-term LC | 63 | 64 |
| PD-L1-GPLGMLSQ-I | C-term HC | 65 | 66 |
| | C-term LC | 67 | 68 |
| | N-term HC | 69 | 70 |
| | N-term LC | 71 | 72 |
| PD-L1-GPLGIAGQ -NanoLuc | C-term HC | 73 | 74 |
| | C-term LC | 75 | 76 |
| | N-term HC | 77 | 78 |
| | N-term LC | 79 | 80 |
| PD-L1-GPLGIAGQ -IL-2 | C-term HC | 81 | 82 |
| | C-term LC | 83 | 84 |
| | N-term HC | 85 | 86 |
| | N-term LC | 87 | 88 |
| PD-L1-GPLGLWAQ -NanoLuc | C-term HC | 89 | 90 |
| | C-term LC | 91 | 92 |
| | N-term HC | 93 | 94 |
| | N-term LC | 95 | 96 |
| PD-L1-GPLGLWAQ -IL-2 | C-term HC | 97 | 98 |
| | C-term LC | 99 | 100 |
| | N-term HC | 101 | 102 |
| | N-term LC | 103 | 104 |
| PD-L1-PVGLIG -NanoLuc | C-term HC | 105 | 106 |
| | C-term LC | 107 | 108 |
| | N-term HC | 109 | 110 |
| | N-term LC | 111 | 112 |
| PD-L1-PVGLIG -IL-2 | C-term HC | 113 | 114 |
| | C-term LC | 115 | 116 |
| | N-term HC | 117 | 118 |
| | N-term LC | 119 | 120 |
| PD-L1-PLGLAG -NanoLuc | C-term HC | 121 | 122 |
| | C-term LC | 123 | 124 |
| | N-term HC | 125 | 126 |
| | N-term LC | 127 | 128 |
| PD-L1-PLGLAG -IL-2 | C-term HC | 129 | 130 |
| | C-term LC | 131 | 132 |
| | N-term HC | 133 | 134 |
| | N-term LC | 135 | 136 |
| PD-L1-GIVGPL -NanoLuc | C-term HC | 137 | 138 |
| | C-term LC | 139 | 140 |
| | N-term HC | 141 | 142 |
| | N-term LC | 143 | 144 |
| PD-L1-GIVGPL -IL-2 | C-term HC | 145 | 146 |
| | C-term LC | 147 | 148 |
| | N-term HC | 149 | 150 |
| | N-term LC | 151 | 152 |
| 9G4-PVGLIG-NanoLuc | C-term HC | 153 | 154 |
| 9G4-PVGLIG-CCL4 | C-term HC | 155 | 156 |
| 9G4_HhG1dK_L6_IL-15 | C-term HC | 157 | 158 |
| 9G4_HhG4PdK_L6_IL-15 | C-term HC | 213 | 214 |
| 9G4-PVGLIG-IFNα | C-term HC | 159 | 160 |
| hNHS76_HhG1dK_L6_IL-15 | C-term HC | 161 | 162 |
| hNHS76_HhG4PdK_L6_IL-15 | C-term HC | 215 | 216 |
| hH16L16_HhG1dK_L6_IL-15IL-15 | C-term HC | 163 | 164 |
| hH16L16_HhG4PdK_L6_IL-15IL-15 | C-term HC | 211 | 212 |
| H16/L16-PVGLIG-IL-36G heavy chain | C-term HC | 173 | 174 |
| 9G4-SGRS-hCXCL10 heavy chain | C-term HC | 175 | 176 |
| NHS76-SGRS-hCXCL10 heavy chain | C-term HC | 177 | 178 |
| H16L16-SGRS-hCXCL10 heavy chain | C-term HC | 179 | 180 |
| H16L16-SGRS-hIL-15 heavy chain | C-term HC | 181 | 182 |
| H16L16-SGRSA-hIFNa heavy chain | C-term HC | 183 | 184 |
| H16L16-PSSRRRVN-hIFNa heavy chain | C-term HC | 185 | 186 |
| hH16L16_HhG1dK_SGRSA_IL-15 | C-term HC | 217 | 218 |

Double linker

| | | | |
|---|---|---|---|
| hH16L16_HhG1dK_L6-L6_IL-15 | C-term HC | 219 | 220 |
| hH16L16_HhG4PdK_L6-L6_IL-15 | C-term HC | 221 | 222 |
| m9G4_HhG1dK_L6_L6_IL-15 | C-term HC | 223 | 224 |
| m9G4_HhG4PdK_L6_L6_IL-15 | C-term HC | 225 | 226 |
| hNHS76_HhG1dK_L6-L6_IL-15 | C-term HC | 227 | 228 |
| hNHS76_HhG4PdK_L6-L6_IL-15 | C-term HC | 229 | 230 |

TABLE 9
Protein fusion of ICC and sushi or sushi+

| | C-term Heavy Chain - cytokine | |
|---|---|---|
| SEQ ID NO. | DNA | Protein |

Single linker

| | | |
|---|---|---|
| hH16L16_HhG1dK_L6_IL- | 231 | 232 |
| 15[nc30-sushi] | | |
| hH16L16_HhG4PdK_L6_IL- | 233 | 234 |
| 15[nc30-sushi] | | |
| hH16L16_HhG1dK_PVGLIG_IL- | 235 | 236 |
| 15[nc30-sushi+] | | |
| hH16L16_HhG4PdK_PVGLIG_IL- | 237 | 238 |
| 15[nc30-sushi+] | | |

Double linker

| | | |
|---|---|---|
| hH16L16_HhG1dK_L6L6_IL- | 239 | 240 |
| 15[nc30-sushi] | | |
| hH16L16_HhG1dK_L6-L6_IL- | 241 | 242 |
| 15[nc30-sushi+] | | |

[0199] 1.2. Obtention of the Immunocytokines (ICC)

[0200] Sequences coding for the whole ICC (see point 1. Sequences) were cloned into pCDNA3.4 vectors by using the HindIII/BamHI restriction sites, including a signal peptide (Thermo Fisher Scientific). The NanoLuc® DNA sequence was obtained from Promega. Linker modification was achieved by Q5 mutagenesis (New England Biolabs). Fusion proteins were obtained by transient protein expression in Expi HEK293 cells (Thermo Fisher Scientific) grown to a density of 2.5 10⁶/ml in Expi293 Expression Medium (Thermo Fisher Scientific) and co-transfected with 1.25 μg/ml DNA (HC/LC: 1/1 w/w) using polyethyleneimine (PEI, Polyscience, DNA/PEI ratio: 1/4). 2 mM valproic acid (VPA, Sigma-Aldrich) was then added 3 hours post transfection. Supernatants containing the produced fusion proteins were harvested 6 days post-transfection. Proteins were purified by affinity chromatography on Protein A-Sepharose and formulated by overnight dialysis against 25 mM sodium citrate, 150 mM NaCl, 6% Saccharose pH 5.5. Some of the constructions realised are resumed in FIG. 1.

[0201] The positions (i.e., the fusion sites) of the linker-cytokine on the Ab are explained on FIG. 2.

### Example 2: Proof of Immunocytokines Formation and Integrity by LC-MS Analysis

[0202] 2.1. Material and Methods:

[0203] All the purified ICC were characterised by SDS-PAGE in non-reducing, heated conditions and in reducing and heated condition. The SDS-PAGE migration of c9G4-PVGLIG-hIL-15, NHS76-PVGLIG-hIL-15 and H16/L16-PVGLIG-hIL-15 are shown in FIG. 22. The apparent ICC molecular weights deduced from the SDS PAGE were in accordance of what was expected with theoretical calculations. At least of 80% for each ICC were complete ICC (H2L2). The monomeric content of ICC was determined by Size Exclusion Chromatography.

[0204] ICC integrity was also verified by LC-MS on glycosylated ICC and on deglycosylated ICC after IdeS digestion. Reverse phase separation was performed on an ultra-high-performance liquid chromatography (UHPLC) system (Acquity UPLC H-Class Bio system, Waters) coupled to a Synapt G2si mass spectrometer, instrument control was performed using MassLynx® software (Waters).

[0205] For c9G4PVGLIG-IL-15, c9G4PVGLIG-hINFa, c9G4PVGLIG-hCCL4, deglycosylation of the Fc region was performed by incubating ICC solution 30 min at 37° C. with IgGZERO® Enzyme (Genovis) at the concentration of 1 unit of enzyme per μg of ICC according with the manufacturer's instructions. For NHS76-PVGLIG-hIL-15 and H16L16-PVGLIG-hIL-15 which carry out N-glycosylation on the IL-15 part, deglycosylation was performed by adding 2 μL of PNGaseF (New England Biolabs, 500 000 U/mL) and 2 μL of neuraminidase (New England Biolabs, 50 000 U/mL) to 25 μg of sample solution followed by incubation at 37° C. overnight. The deglycosylated ICC were injected on a zorbax diphenyl column (Agilent) heated at 80° C. Elution was performed with water as eluent A and acetonitrile as eluent B, both containing 0.1% FA and 0.02 TFA. The gradient condition was maintained at 30% B for 0.5 min, ramped to 46.9% in 6.5 min and increased to 95% in 0.1 min.

[0206] Subunit Fc/2 fragments were obtained by incubating ICC solution during 30 minutes at 37° C. with IdeS enzyme (FabRICATOR®, Genovis) at the concentration of 1 Unit of enzyme per μg of ICC according to the manufacturer's instructions. Deglycosylated and digested ICC were injected on a PLRP-S column (Agilent) heated at 80° C. Elution was performed with water as eluent A and acetonitrile as eluent B, both containing 0.05% TFA. The gradient condition was maintained at 5% B for 5 min, ramped to 50% in 45 min and increased to 95% in 2 min

[0207] 2.2. Results

[0208] On MS chromatogram peaks, m/z spectrum was extracted and mass determined after m/z spectrum deconvolution and calculated masses of deglycosylated ICC and deglycosylated fc/2 were compared with experimental masses.

[0209] The LS-MS analysis of deglycosylated c9G4-PVGLIG-hIL-15, NHS76-PVGLIG-hIL-15 and H16/L16-PVGLIG-hIL-15 immunocytokines is represented in (FIG. 2 and FIG. 3). The pattern is consistent with what was expected for a fully formed ICC, as shown in Table 8:

TABLE 8
C-term HC ICC: Comparison of experimental
vs. theoretical masses of ICC and Fc/2.

| | |
|---|---|
| | Subunit: c9G4-Fc/ |
| ICC | 2 + Cytokine |

| | Calcu- | Experi- | Calcu- | Experi- |
|---|---|---|---|---|
| | lated | mental | lated | mental |
| | MW | MW | MW | MW |
| | (Da) | (Da) | (Da) | (Da) |
| C9G4-PVGLIG- | 171746 | 171760 | 37076 | 37081 |
| hIL-15 | | | | |
| C9G4-PVGLIG- | 158378 | 158379 | 43892 | 43892 |
| hINFa | | | | |
| C9G4-PVGLIG- | 164725 | 164727 | 32470 | 32469 |
| hCCL4 | | | | |

| | | | Subunits: NHS76 or | |
|---|---|---|---|---|
| | | | H16/L16-Fc/ | |
| | ICC | | 2 + Cytokine | |
| | Calcu- | Experi- | Calcu- | Experi- |
| | lated | mental | lated | mental |
| | MW | MW | MW | MW |
| | (Da) | (Da) | (Da) | (Da) |
| NHS76-PVGLIG- | 169559 | 169566 | 37084 | 37085 |
| hIL-15 | | | | |
| H16/L16-PVGLIG- | 172120 | 172138 | 37084 | 37083 |
| hIL-15 | | | | |

†EC₅₀ values could not be determined due to impaired IL-15 ability to trigger receptor dimerisation. function.

[0210] Whole experimental masses confirmed the ICC structures (2 cytokines/antibody) and Fc/2+ Cytokine masses confirmed the cytokine position.

[0211] Similar experiments were performed and similar conclusions were obtained for other ICCs.

### Example 3: Linker Sequences and Cleavability by MMP-9/2

[0212] Five linkers from the literature were evaluated as substrates for MMP-9 when fused to four different sites on the PDL1 Ab sequence: N-term HC, N-term LC, C-term HC and C-term LC. The ‘GIVGPL’ linker described as non-cleavable (Chau et al. Bioconjug Chem (2004) 15(4):931-41) was used as negative control. The summary of the constructions and results are displayed in FIG. 7.

[0213] 3.1. Materials and Methods

[0214] 2 μg of purified ICC were incubated in presence of 40 ng recombinant MMP-9 or MMP-2 (molar ratio 25:1) in assay buffer containing 20 mM Tris pH 7.5, 10 mM CaCl₂ and 100 mM NaCl in 20 μl total volume. Samples were incubated at 30° C. for 2.5 hrs under gentle agitation (300 rpm). Cleavage reaction was stopped by addition of loading buffer+reducing agent (4×XT sample Buffer and 20× Reducing Agent, BioRad) and sample heating at 90° C. for 5 min.

[0215] Cleavage efficiency was then evaluated by SDS-PAGE. 20 μl of sample were run onto Criterion TGX 4-15% Stain Free gels (BioRad) in Tris-Glycine-SDS buffer (BioRad) at 300 V for 20 min with protein standards (Precision Plus Protein Standards, Unstained, BioRad). Protein bands were then revealed using a ChemiDoc Touch Imager (BioRad).

[0216] 3.2. Results

3.2.1. Cleavability with different linkers in HC or LC C-terminal fusions of anti-PDL1 antibodies and two different molecules: IL-2 and NanoLuc®:

[0217] The results are shown in FIG. 4

3.2.2. Cleavability with different linkers in HC or LC N-terminal fusions of anti-PDL1 antibodies and two different molecules: IL-2 and NanoLuc®:

[0218] The results are shown in FIG. 5.

3.2.3. Cleavability of different c9G4-based ICC and H16/L16-IL-15 and HHS76-IL-15 ICC by human and murine MMP-9/2 (HC C-term fusions and PVGLIG linker). The results are shown in FIG. 6.

[0219] Note 1: IL-15 and IFNα visualisation post-cleavage in impaired by the high level of glycosylation of the proteins. Sample deglycosylation prior cleavage allows the visualisation of the released cytokines, indicating the proteins are not proteolysed by MMP-9/2 (data not shown).

[0220] 3.3. Conclusion

[0221] Results of FIGS. 4, 5 and 6 are summarized in FIG. 7. Two fusions sites were identified, which allowed correct cleavage by the protease: N-term and C-term of the Ab heavy chain.

[0222] On the other hand, MMP-9 linkers were only weakly cleaved by either MMP-2 or MMP-9 when fused on N-term or C-term of the Ab light chains.

[0223] All five c9G4-fusion proteins are cleaved by murine and human MMP-9 and MMP-2 (FIG. 6).

### Example 4: Analysis of the MMP-9 In Vitro Stability by LC-MS

[0224] 4.1. Materials and Methods

[0225] ICC were spiked in buffer (50 mM Tris pH7.5, 150 mM NaCl, 20 mM CaCl₂)), sera, plasma, and fresh blood at a concentration of 100 μg/ml with and without 12 nM MMP-9. Aliquots of 100 μl were incubated at +37° C. in Protein LoBind Tube (Eppendorf). After 24 hrs samples were removed from the oven and stored at −80° C. until sample processing and analysis.

[0226] The ICC was immunoprecipitated from biological fluid by immunoprecipitation using M280 streptavidin magnetics beads coated with 4 μg of CaptureSelect™ human IgG-Fc Biotin. After washing, ICC was eluted with 0.4% TFA in water and freeze drying. The samples were reconstituted in denaturing buffer (6 M Guanidine, 0.1 M Tris, 2 mM EDTA pH 8.0) and reduced in presence of DTT for 45 min at 56° C. Acetic acid was then added to quench the reaction and samples were analysed by LC-MS.

[0227] Reverse phase separation was performed on an ultra-high-performance liquid chromatography (UHPLC) system (Acquity UPLC H-Class Bio system, Waters) coupled to a Synapt G2si mass spectrometer, instrument control was performed using MassLynx® software (Waters).

[0228] The reduced samples were diluted volume to volume with eluent A and injected on a PLRP-S column heated at 80° C. with a flow rate of 0.5 mL/min. Elution was performed with water as eluent A and acetonitrile as eluent B, both containing 0.05% TFA. The gradient condition was maintained at 5% B for 5 min, ramped to 70% in 45 min and increased to 95% in 2 min.

[0229] For each peak of MS chromatogram, m/z spectrum was extracted and mass determined after m/z spectrum deconvolution.

[0230] 4.2. Results

[0231] 4.2.1 Validation of MMP-9 Cleavage Site in ICC.

[0232] In MMP-9 absence, no cleaved fragments were observed for both anti-PDL1-PVGLIG-NanoLuc® and anti-PDL1-GIVGPL-NanoLuc®, thus both linkers were stable in buffer at the concentration of 12 nM.

[0233] Cleavage in presence of MMP-9 was checked by LC/MS as described in Example 2. The results are shown in FIGS. 8A and B.

[0234] In the presence of MMP-9, 100% of antibody anti-PDL1-PVGLIG-NanoLuc® were cleaved in buffer after 24 hrs at 37° C. (FIG. 8A). In fact, in FIG. 8A, the peak observed at 29.47 min which corresponds to the heavy chain of the anti-PDL1 antibody linked to a fragment of the PVGLIG linker (PVG). In comparison, no such a fragment is observed in FIG. 8B where the major signal corresponds to the full heavy chain of the anti-PDL1 antibody linked to the GIVGPL linker and NanoLuc®. MMP-9 is thus unable to cleave the GIVGPL peptide as opposed to PVGLIG peptide.

[0235] 4.2.2. MMP-9 Cleavage in Sera, Plasma and Fresh Blood

[0236] The results are shown in FIG. 9. With or without MMP-9 spiking, similar profiles were obtained at T0 and T24 in mouse heparin plasma, in mouse, cynomolgus, human sera and in whole mouse heparin blood. MMP-9 was inhibited in all the biological fluids tested, LC-MS profiles example presented in FIG. 9.

[0237] In conclusion, monitoring of In vitro antibody anti-PDL1 hkappa/hIgG4-PVGLIG-NanoLuc® cleavage was not possible in plasma heparin, sera and whole heparin blood (data not shown), probably because MMP-9 was inhibited. In fact, MMP-9 is known to be naturally attenuated in serum, plasma and blood, notably because of the presence of protease inhibitors like A2M.

### Example 5: Attenuation of hIL-15 when Fused to an Antibody

[0238] In order to evaluate and to compare the biological activity of hIL-15, when linked to the ICC or after cleavage by MMP9, a test of IL-15 receptor dimerisation was performed. IL-15 in its active form signals through the dimerisation of its two receptor subunits IL-2Rβ/IL-2Rγ.

[0239] 5.1. Materials and Methods

[0240] 5.1.1. Materials and Reagents

[0241] Recombinant human recombinant pro-MMP-9 was purchased from R&D Systems and activated by 1 mM 4-Aminophenylmercuric acetate (APMA) in buffer containing 50 mM Tris, 150 mM NaCl, 10 mM CaCl₂), 0.05% Brij-35 (w/v), pH7.5. APMA was then removed using Zeba™ Spin Desalting Columns (ThermoFisher Scientific) and APMA-free MMP-9 was immediately stored at −80° C. until needed. Recombinant human IL-15 was purchased from PeproTech. IL-15 activity was monitored using the PathHunter® U2OS IL-2Rβ/IL-2Rγ/(IL-2Rα) Dimerisation Bioassay (DiscoverX, Eurofins). The assay allows the detection of the IL-15-induced dimerisation of the two receptor subunits IL-2Rβ and IL-2Rγ.

[0242] 5.1.2. Methods

[0243] The activity of three IL-15-based immunocytokines was assessed: NHS76-PVGLIG-hIL-15, H16/L16-PVGLIG-hIL-15 and c9G4-PVGLIG-hIL-15. The effect of recombinant hIL-15 and hMMP-9 was also evaluated using the same procedure. All samples were incubated for two hours in presence (+MMP-9) or absence (−MMP-9) of recombinant hMMP-9 in an assay buffer containing 50 mM Tris, 150 mM NaCl, 10 mM CaCl2) pH 7.5. Cleavage efficiency was controlled by SDS-PAGE analysis and samples were immediately stored at −20° C. until processing. U2OS IL-2Rβ/IL-2Rγ/IL-2Rα cells were treated by either cleaved or uncleaved ICC and controls for 6 hours. Detection reagent was then added and chemiluminescence intensity was recorded with a microplate reader (Infinite M1000Pro, Tecan). Data analysis was performed with the Prism 7.01 software (GraphPad).

[0244] 5.2. Results

[0245] The results of the hIL-15 induced receptor dimerisation for the three tested ICC are presented in FIG. 10 as function of the hIL-15 concentration.

[0246] The EC₅₀ of each compound or ICC are shown in Table 9.

[0247] As seen in FIG. 10 and Table 9, hIL-15 and hIL-15+ MMP-9 highly induce receptor dimerisation and thus validate the experiment. On the contrary MMP-9 alone has no effect on IL-2Rβ/IL-2Rγ dimerisation as expected.

[0248] In the absence of MMP-9, the three evaluated ICC had no significant activity on receptor dimerisation. On the other hand, pre-treatment of the same molecules with MMP-9 results in activity recovery through IL-15-induced receptor dimerisation in a dose dependent manner.

[0249] It appears thus clearly from these experiments that IL-15 shows a highly attenuated activity when linked to the three antibodies. After cleavage of the ICC by MMP-9, IL-15 is liberated in its active form and is again able to fulfil its biological activity.

TABLE 9
EC₅₀ of Ab-bound hIL-15 vs free hIL-15 (recombinant or released after linker cleavage).

| | IL-15 | | NHS76 IL-15 | | H16/L16 IL-15 | | c9G4 IL-15 | |
|---|---|---|---|---|---|---|---|---|
| | −MMP-9 | +MMP-9 | −MMP-9 | +MMP-9 | −MMP-9 | +MMP-9 | −MMP-9 | +MMP-9 |
| EC₅₀ (nM) | 0.72 ± 0.57 | 0.71 ± 0.42 | ND† | 8.84 ± 1.08 | ND† | 2.84 ± 1.06 | ND† | 2.07 ± 1.79 |

†EC₅₀ values could not be determined due to impaired IL-15 ability to trigger receptor dimerisation. function.

### Example 6: In Vivo Stability of ICC

[0250] 6.1. Materials and Methods:

[0251] 6.1.1. Engraftment of Mice and Injection of ICC

[0252] Six-week-old immunocompetent BALB/c mice were used for all in vivo assessments. They were housed in sterilized filter-topped cages, maintained in sterile conditions and manipulated according to French and European guidelines.

[0253] RENCA (ATCC: CRL-2947), a murine renal carcinoma cell line expressing PDL1 was selected for in vivo evaluations. Mice were injected subcutaneously at DO with 0.5×10⁶ cells. When tumours reached 100 mm³ (11-12 days post tumour cell injection), animals were divided into 9 groups of 6 mice with comparable tumour size and administered intraperitoneally with PDL1-PVGLIG-NanoLuc® or the control isotype c9G4-PVGLIG-NanoLuc®, 200 μg/mouse Q1d1.

[0254] 6.1.2. Serum Samples

[0255] Animals were sacrificed at 0, 3, 6, 24 and 48 hours post administration and blood samples were collected in Na-heparinised tubes by cardiac puncture. Blood samples were centrifuged for 15 min at 1500 g, 4° C. and plasma was collected in 96 well U bottomed plates. Plasma samples were frozen (−80° C.) prior to analysis.

[0256] 6.1.3. Tumour Samples

[0257] Tumours were sampled and snap frozen in liquid nitrogen and were stored at −80° C.

[0258] Prior to evaluation, the tumours are “resuspended” in 50 mM Tris-HCl buffer, 150 mM NaCl, 0.5% DOC, 1% Igepal, 1% Triton X100 containing an inhibitor cocktail (lysis buffer) at 200 mg of tumour per ml of buffer.

[0259] The tumours are disrupted with Minilys by 3 cycles of agitation at 5000 rpm in the presence of steel balls for 15 seconds. Between 2 cycles the tubes are kept on ice for 2 min. The solution is placed in a 2 ml conical Eppendorf tube and centrifuged at 11500 g at 4° C. for 10 min. The supernatant, i.e., the cell lysate, is recovered. Its protein content is measured by Bicinconinic Acid assay according to the manufacturer's instructions.

[0260] 6.1.4. Western Blot Analysis

[0261] Serum samples as well as tumour samples were analysed by Western Blot. For each in vivo experiment the Western blots were done in triplicates.

[0262] Briefly, samples to be analysed are loaded on precast 4-15% polyacrylamide gel, at a rate of 0.1 μl for the plasma samples and 2 μl for the tumour lysates. Samples are migrated under heated, non-reduced conditions. Proteins are then transferred on nitrocellulose membranes using Trans-Blot® Turbo™ Midi Nitrocellulose Transfer Packs (2.5 A, 25 V, 7 min). After a 1 h, room-temperature saturation step in Tris buffered saline, 0.05% Tween 20, 1% milk (TBS-T 1% milk), membranes are incubated 1 h at room temperature with goat anti-hIgG-HRP, Fcγ Fragment specific ( 1/50000). After three washes, membranes labelling is analysed on ChemiDoc™ Touch Gel Imaging System.

[0263] 6.1.5. Softwares

[0264] Densitometric analysis of western blot are carried out with Image Lab (Bio-Rad).

[0265] Statistical analyses are carried out with GraphPad Prism6.

[0266] 6.2. Results:

[0267] 6.2.1 In Vivo Stability of ICC in Mice Sera.

[0268] The stability of the ICC was evaluated in mice sera as a function of time. FIG. 11 shows the results obtained by western blot at 3 h, 6 h and 24 h post ICC injection. The amount of circulating ICC dramatically decreases as a function of time for each ICC construct tested. Without being bound by theory, this result is most easily explained by the sequestration of the ICC in the tumour and/or by the natural in vivo Ab degradation.

[0269] The western blots were submitted to densitometric analysis. The graphic representations (FIG. 12) shows the percentage of uncleaved ICC calculated as follow: [Intensity of the uncleaved ICC/(cleaved+uncleaved)ICC]×100. Both model ICC behaved similarly in blood circulation, i.e. they looked stable over a 6 hours period, before losing progressively their NanoLuc® counterpart.

[0270] Overall, there was no significant difference between circulating c9G4 ICC and PDL1 ICC.

[0271] 6.2.2. In Vivo Stability of ICC in Mice Tumour Samples.

[0272] The stability of the ICC was evaluated in mice tumour samples as a function of time. FIG. 14 shows the results obtained by western blot at 3 h, 6 h and 24 h post ICC injection.

[0273] The Western Blots were submitted to densitometric analysis, the graphic representations (FIG. 15) show the percentage of uncleaved ICC calculated as previously described.

[0274] Both model ICC behaved similarly, i.e., the NanoLuc® counterpart was cleaved in RENCA tumours over a 48-hour period. PDL1 ICC cleavage was detected very quickly (less than 60% of uncleaved form in the tumour as early as 3 hours post-injection). At 24 hour-post injection, more than 80% of the total ICC present in the tumour was cleaved.

[0275] The cleavage of the c9G4 ICC was slower, with about 20% of the ICC cleaved in the tumour 6 hours post-injection. However, at 24 hours post injection, more than 80% of the total ICC present in the tumour is cleaved. Statistical analysis was performed on tumour-sequestered ICC. The amount of total tumour sequestered ICC was determined by adding of the signals obtained for the uncleaved ICC and the cleaved ICC at each time point.

[0276] FIG. 16 shows a quantitative analysis of total ICC (cleaved and uncleaved) present in the tumours as a function of time.

[0277] Overall the PDL1-ICC was more sequestered in the RENCA tumours than the control c9G4 ICC.

[0278] These results demonstrate that a tumour-specific ICC is able to accumulate quickly in the tumour environment. After accumulation, the ICC is cleaved by the tumour-specific protease releasing specifically the cytokine in the tumour environment.

[0279] 6.2.3. In Vivo Stability of ICC in Mice Sera Compared to Tumour Samples.

[0280] The behaviour of the two ICC was compared in plasma versus tumour samples in RENCA engrafted mice as a function of time.

[0281] FIG. 17 shows that regardless of the nature of the antibody moiety, ICC are significantly more cleaved in the RENCA tumours than in the mouse plasma.

### Example 7: In Vitro T Cell Activation with ICC

[0282] 7.1. Materials and Methods:

[0283] 7.1.1 Materials and Methods.

[0284] Recombinant human IL-15 was purchased from PeproTech.

[0285] The following ICC constructions were tested:
[0286] NHS76-PVGLIG-IL-15;
[0287] H16/L16-PVGLIG-IL-15; and
[0288] c9G4-PVGLIG-IL-15

[0289] The following controls were added: hIL-15, MMP9, hIL-15+MMP9 and individual antibodies.

[0290] 7.1.2. Methods

[0291] The activity of three IL-15-based immunocytokines, i.e. NHS76-IL-15, H16/L16-IL-15, and c9G4-IL-15, was assessed on their ability to activate murine and human CD3⁺ T cells. The effect of hIL-15+/−MMP9, MMP9 and individual antibodies was also evaluated using the same procedure.

[0292] Murine CD3⁺ T cells were isolated by negative selection from the spleen of balb/c mice (Charles River) using the murine pan T cells isolation kit II (Miltenyi, 130-095-130) according to the manufacturer's instructions. Two spleens per experiment were used for the T cells isolation.

[0293] Human peripheral blood mononuclear cells (PBMC) were isolated from fresh blood from healthy donors' cytapheresis rings by density gradient centrifugation. CD3 T cells were then purified by negative selection from PBMC using the human pan T cells isolation kit II (Miltenyi, 130-096-535).

[0294] Murine and human CD3⁺ T cells were seeded at 200 000 cells/well in culture medium, RPMI1640+10% FCS+2 mM L-glutamine+10 mM Hepes+1% Penicillin/streptomycin+0.1 mM beta-2-mercaptoethanol or RPMI 1640+10% FCS+1% L-glutamine+1% Sodium Pyruvate+1% Penicillin/streptomycin, respectively.

[0295] They were then treated with human IL-15 as a positive control at 100 and 200 ng/ml or with the different ICC constructions at 6 μg/ml with an equivalent of 200 ng/ml for IL-15 in the presence or not of MMP9. Cells were incubated at 37° C. 5% CO2 and culture medium was refreshed after 3 days.

[0296] Activation of CD3⁺ T cells was monitored after 6 days of treatment through the expression of CD25 and CD69 surface markers. The expression of these markers was assessed by flow cytometry (Novocyte, ACEA). Cell culture supernatants were transferred into 96-wells plates for interferon-γ secretion analysis by flow cytometry (BD, CBA IFN Flex Set).

[0297] For each murine and human T cell activation experiment, the analysis was performed in triplicate; three human healthy donors were tested.

[0298] Data analysis was performed with the Prism 7.01 software (GraphPad).

[0299] 7.2. Results

[0300] The ability of ICC to activate murine T cells was compared to controls. T cell activation was measured by T cell expression of CD69 or CD25. FIGS. 23A and B, show that NHS76-PVGLIG-IL-15 and c9G4-PVLGIG-IL-15 induce the expression of CD69 and CD25 in presence of MMP-9 but not in the absence of MMP-9. Activation of murine T cells is thus not observed when the ICC are uncleaved. Negative control (antibody alone, MMP-9 alone, buffer alone) or positive control (IL-15 and IL-15+MMP-9 alone) were also tested to confirm the validity of the experiment.

[0301] As shown in FIGS. 23 B and C, cleaved H16/L16-PVGLIG-IL-15 (but not the ICC uncleaved form) is also able to activate murine T cell activation in a similar way.

[0302] The same experiments were performed with human T cells from healthy donors. T cell activation was measured by T cells expression of CD69 or CD25. NHS76-PVGLIG-IL-15, c9G4-PVLGIG-IL-15 and H16L16-PVGLIG-IL-15 induce expression of CD69 and CD25 in presence of MMP-9 but not in absence of MMP-9 (FIGS. 24A, B, C and D). Activation of the human T cells was thus not observed when the ICC are uncleaved. Negative control (antibody alone, MMP-9 alone, buffer alone) or positive control (IL-15 and IL-15+MMP-9 alone) were also tested to confirm the validity of the experiment.

[0303] This activation of T cells in presence of cleaved (but not of uncleaved ICC) was also measured by the secretion of IFN-γ by human T cells from two different donors.

### Example 8: Attenuation of hIL-36γ when Fused to an Antibody

[0304] To evaluate and compare the biological activity of hIL-36γ when part of an ICC or after cleavage by MMP9, IL-36γ activity was assayed by measuring CXCL8 production in human epidermoid cancer A431 cell culture. This assay is based on the finding that IL-36γ signaling pathway can trigger CXCL8 secretion.

[0305] 8.1. Materials and Methods

[0306] 8.1.1. Materials and Reagents

[0307] Recombinant human recombinant pro-MMP-9 was purchased from R&D Systems and activated by 1 mM 4-Aminophenylmercuric acetate (APMA) in buffer containing 50 mM Tris, 150 mM NaCl, 10 mM CaCl₂, 0.05% Brij-35 (w/v), pH7.5. APMA was then removed using Zeba™ Spin Desalting Columns (ThermoFisher Scientific) and APMA-free MMP-9 was immediately stored at −80° C. until needed. Recombinant human IL-36γ was purchased from R&D Systems. IL-8 was dosed using the Human IL-8 DuoSet ELISA (R&D Systems).

[0308] 8.1.2. Methods

[0309] To assess the activity of an IL-36 γ-based immunocytokine (H16/L16-PVGLIG-IL-36), squamous carcinoma A431 cells were incubated for 24 hours with the ICC or the different control molecules. All the samples were tested in the presence (+MMP-9) or absence (−MMP-9) of recombinant hMMP-9 in an assay buffer containing 50 mM Tris, 150 mM NaCl, 10 mM CaCl2) pH 7.5. The cell culture medium was then collected and hIL-8 dosed by ELISA. The effect of recombinant hIL-36γ and H16/L16 antibody (+/−hMMP-9) was also evaluated using the same procedure. Data analysis was performed with the Prism 7.01 software (GraphPad).

[0310] 8.2. Results

[0311] The results of the hIL-8 production in A431 cultures for the ICC and controls are presented in FIG. 26. Data are expressed in O.D (450 nm) corresponding to hIL-8 expression level as a function of the hIL-36γ concentration.

[0312] As seen in FIG. 26, rhlL-36γ and rhlL-36γ+MMP-9 highly induced hIL-8 production by A431 cells and thus validated the experimental format. On the other hand, neither MMP-9 alone nor the antibody H16/L16 (+/−MMP9) had any effect on hIL-8 production as expected.

[0313] In the absence of MMP-9, the H16/L16-PVGLIG-hIL-36γ ICC had no significant activity on hIL-8 production. On the other hand, pre-treatment of the same molecules with MMP-9 resulted in activity recovery as observed through IL-8 production in a dose dependent manner.

[0314] In summary, the C-terminal linkage of hIL-36γ using PVGLIG to H16/L16 antibody totally attenuates the cytokine activity. A MMP9 cleavage within the PVGLIG peptide restores it at a level comparable those of the free hIL-36γ cytokine at an equivalent dose.

### Example 9: Attenuation of hIFNα2α when Fused to an Antibody

[0315] In order to evaluate and compare hIFNα2a biological activity when linked to the ICC or after cleavage by MMP9, IFNα2a activity was assayed with a cell-based luciferase reporter bioassay.

[0316] 9.1. Materials and Methods

[0317] 9.1.1. Materials and Reagents

[0318] Recombinant human recombinant pro-MMP-9 was purchased from R&D Systems and activated by 1 mM 4-Aminophenylmercuric acetate (APMA) in buffer containing 50 mM Tris, 150 mM NaCl, 10 mM CaCl₂), 0.05% Brij-35 (w/v), pH7.5. APMA was then removed using Zeba™ Spin Desalting Columns (ThermoFisher Scientific) and APMA-free MMP-9 was immediately stored at −80° C. until needed. Recombinant human IFNα2a was purchased from Pbl Assay Science (rhIFNα2a).

[0319] 9.1.2. Methods

[0320] IFNα2a activity was monitored using the GloResponse™ ISRE-luc2P/HEK293 (Promega). The ISRE-luc2P/HEK293 cell line contains the firefly luciferase gene under the control of ISRE stably integrated into HEK293 cells. Binding of IFNα2a to its receptor leads to the activation of the JAK pathway, thereby promoting ISRE-dependent transcription of the luciferase gene. Luminescence can then be detected upon addition of a substrate and quantified with a luminometer.

[0321] The activity of three hIFNα2a-based immunocytokines was assessed: NHS76-PVGLIG-h IFNα2a, H16/L16-PVGLIG-hIFNα2a and c9G4-PVGLIG-hIFNα2a. The effect of recombinant hIFNα2a was also evaluated using the same procedure. All samples were incubated for one hour in presence (+MMP-9) or absence (−MMP-9) of recombinant hMMP-9 in an assay buffer containing 50 mM Tris, 150 mM NaCl, 10 mM CaCl2) pH 7.5.

[0322] Cleavage efficiency was controlled by SDS-PAGE analysis and samples were immediately stored at −20° C. until processing. ISRE-luc2P/HEK293 cells were treated with either cleaved or uncleaved ICC or controls overnight. Detection reagent (Bio-Glo™ luciferase Assay reagent) was then added and chemiluminescence intensity was recorded with a microplate reader (Infinite M1000Pro, Tecan). Data analysis was performed with the Prism 7.01 software (GraphPad).

[0323] For H16/L16-PVGLIG-hIFNα2a, cells were pre-treated or not with 10 μg of H16/L16 antibody lacking a cytokine fusion in order to saturate IGF1-R binding sites on the ISRE-luc2P/HEK293 cell surface.

[0324] 9.2. Results

[0325] The results of the hIFNα2a activity assay for the three tested ICC are shown in FIG. 27 as a function of the hIFNα2a concentration. The EC50 of each compound or ICC are shown in Table 10.

[0326] Both hIFNα2a and hIFNα2a+MMP-9 strongly induce signalling response, as shown by the luciferase expression, thus validating the experiment (FIG. 27 and Table 10).

[0327] In the absence of MMP-9, each of the three assessed ICC: c9G4-PVGLIG-hIFNα2a (FIG. 27A), NHS76-PVGLIG-hIFNα2a (FIG. 27B), and H16/L16-PVGLIG-hIFNα2a, with (FIG. 27C) or without (FIG. 27D) preincubation of the cells with 10 μg/ml H16/L16 antibody, showed a highly attenuated activity compared to equimolar concentrations of hIFNα2a activity. On the other hand, pre-treatment of the same molecules with MMP-9 results in activity recovery in a dose dependent manner.

[0328] It appears thus clearly from these experiments that hIFNα2a shows an attenuated activity when linked to any of the three antibodies. After cleavage of the ICC by MMP-9, hIFNα2a is liberated in its active form and is again able to fulfil its biological activity.

TABLE 10
EC50 (nM) of Ab-bound hIFNα2a vs free hIFNα

| | | | | H16L16- hIFNa2a | |
|---|---|---|---|---|---|
| | | c9G4- | NHS76- | No pre | Pre incubation |
| | hIFNα2a | hIFNα2a | hIFNα2a | incubation | with H16/L16 |
| −MMP9 | 0.08 ± 0.01 | 4.00 ± 1.40 | 5.33 ± 2.6 | 0.03 ± 0.009 | 0.95 ± 0.05 |
| +MMP9 | 0.05 ± 0.01 | 0.02 ± 0.005 | 0.03 ± 0.008 | 0.02 ± 0 | 0.02 ± 0 |

### Example 10: Attenuation of hIL-15 when Fused to an Antibody

[0329] To evaluate and to compare the biological activity of hIL-15, when linked to the ICC or after cleavage by uPA, a biological test of IL-15 activity was used (Promega IL-15 Bioassay)

[0330] 10.1. Materials and Methods

[0331] 10.1.1. Materials and Reagents

[0332] Recombinant urokinase (=uPA) was purchased from Abcam: ab92767 for the human. Recombinant human IL-15 was purchased from PeproTech (200-15).

[0333] IL-15 activity was monitored using the IL-15 Bioassay from Promega (Cat. #JA2015). This is a bioluminescent cell-based assay designed to measure IL-15 stimulation or inhibition using the STAT-5 response element as a readout. When IL-15 binds to its receptor, receptor-mediated pathway signalling induces luminescence that can be detected upon addition of a substrate and quantified with a luminometer.

[0334] 10.1.2. Cleavage

[0335] Constructions to evaluate are incubated in PBS with uPA during 24 h at 37° C.

[0336] Cleavage efficiency was controlled by SDS-PAGE analysis and samples were immediately stored at −20° C. until processing.

[0337] 10.1.2. Methods

[0338] IL-15 cells were treated for 6 h with either cleaved or uncleaved ICC or controls. Detection reagent (Bio-Glo™ luciferase Assay reagent) was then added and chemiluminescence intensity was recorded with a microplate reader (Mithras, Berthold). Data analysis was performed with the Prism 7.01 software (GraphPad).

[0339] 10.2. Results

[0340] The results of the hIL-15 activity for the ICC and controls are presented in FIG. 28. Data are expressed in relative luminescence (RLU) corresponding to hIL-15 activity level as a function of the STAT-5 activation.

[0341] Both rhIL-15 and rhIL-15+ uPA highly activated luminescence, thereby validating the experiment format. In the absence of uPA, the H16L16-SGRSA-hIL-15 ICC had no significant IL-15 activity. Pre-treatment of the same molecule with uPA resulted in a significant recovery of activity as observed through the STAT-5 activation (FIG. 28).

[0342] In summary, the C-terminal linkage of hIL-15 using SGRSA to H16/L16 antibody totally attenuates its activity. Cleavage by uPA within the SGRSA peptide significantly restores IL-15 activity.

### Example 11: Attenuation of hIFNα when Fused to an Antibody

[0343] To evaluate and to compare the biological activity of hIFNα, when linked to the ICC or after cleavage by uPA, a biological test of IFNα activity was used (GloResponse ISRE-luc2P).

[0344] 11.1. Materials and Methods

[0345] 11.1.1. Materials and Reagents

[0346] Recombinant human urokinase (=uPA) was purchased from Abcam (ab92767). Recombinant human IFNα was purchased from PBL (11101-02). IFNα activity was monitored using the GloResponse ISRE-luc2P (Promega C5190701). This is a bioluminescent HEK293 cell-based assay designed to measure IFNα stimulation or inhibition using interferon-stimulated response element (ISRE) that drives transcription of the luciferase reporter gene luc2P (Photinus pyralis). When IFNα binds to its receptor, receptor-mediated pathway signalling induces luminescence that can be detected upon addition of a substrate and quantified with a luminometer.

[0347] 11.1.2. Cleavage

[0348] Constructions to evaluate are incubated in PBS with uPA during 24 h at 37° C. Cleavage efficiency was controlled by SDS-PAGE analysis and samples were immediately stored at −20° C. until processing.

[0349] 11.1.2. Methods

[0350] ISRE-luc2P/HEK293 cells were pre-treated for 1 h with 10 μg of anti IGF1R antibody in order to saturate IGF1R binding sites on the cell surface.

[0351] ISRE-luc2P/HEK293 cells were treated with either cleaved or uncleaved ICC or controls overnight. Detection reagent (Bio-Glo™ luciferase Assay reagent) was then added and chemiluminescence intensity was recorded with a microplate reader (Mithras, Berthold). Data analysis was performed with the Prism 7.01 software (GraphPad).

[0352] 11.2. Results

[0353] The results of the hIFNα activity for the ICC and controls are presented in FIGS. 29A and 29B. Data are expressed in relative luminescence (RLU) corresponding to hIFNα activity level as a function of the ISRE activation.

[0354] 11.2.1 H16L16-SGRSA-hIFNα

[0355] As seen in FIG. 29A, rhIFNα and rhIFNα+uPA highly activated luminescence and thus validated the experiment format.

[0356] In the absence of uPA, the IFNα EC50 of H16/L16-SGRSA-hIFNα ICC showed a 2-log reduction with only 75% maximal activity. Pre-treatment of the same molecule with uPA resulted in a similar activity to rhIFNα as determined by ISRE activation.

[0357] In summary, the C-terminal linkage of hIFNα using SGRSA to H16/L16 antibody attenuates its activity. Cleavage by uPA within the SGRSA peptide restores it at a level similar to that of the free hIFNα cytokine.

[0358] 11.2.2 H16/L16-PSSRRRVN-hIFNα

[0359] As seen in FIG. 29B, r hIFNα and r hIFNα+uPA highly activated luminescence and thus validated the experiment format.

[0360] In the absence of uPA, the IFNα EC50 H16/L16-PSSRRRVN-hIFNα ICC displayed a 2-log reduction with a 75% maximal activity. Pre-treatment of the same molecule with uPA resulted in an activity recovery as observed through the ISRE activation.

[0361] In summary, the C-terminal linkage of hIFNα using PSSRRRVN to H16/L16 antibody attenuates its activity. Cleavage by uPA within the PSSRRRVN peptide restores activity to a level comparable to the free hIFNα cytokine.

### Example 12: Attenuation of hCXCL10 when Fused to an Antibody

[0362] To evaluate and compare the biological activity of hCXCL10 when linked to the ICC or after cleavage by uPA, a biological test of β-arrestin recruitment induced by CXCL10 binding to the CXCR3 receptor was performed (PathHunter eXpress CXCR3 CHOK1 β-arrestin GPCR assay).

[0363] 12.1. Materials and Methods

[0364] 12.1.1. Materials and Reagents

[0365] Recombinant human urokinase (=uPA) was purchased from Abcam (ab92767). Recombinant human CXCL10 was purchased from Peprotech (300-12). CXCL10 activity was monitored using the PathHunter eXpress CXCR3 CHOK1 β-arrestin GPCR assay (DiscoverX 93-0271E2). This is a bioluminescent CHO cell-based assay designed to measure β-arrestin recruitment induced by CXCL10 binding to the CXCR3 receptor.

[0366] Activation of the GPCR-PK induces β-arrestin-EA recruitment, forcing complementation of the two β-galactosidase enzyme fragments (EA and PK). The resulting functional enzyme hydrolyzes substrate to generate a chemiluminescent signal that can be detected upon addition of a substrate and quantified with a luminometer.

[0367] 12.1.2. Cleavage

[0368] Constructions to evaluate are incubated in PBS with uPA during 1 h at 37° C. Cleavage efficiency was controlled by SDS-PAGE analysis and samples were immediately stored at −20° C. until processing.

[0369] 12.1.2. Methods

[0370] CHO-K1 CXCR3 cells were treated with either cleaved or uncleaved ICC or controls for 1 h30. Detection reagent was then added and chemiluminescence intensity was recorded 1 h later with a microplate reader (Mithras, Berthold). Data analysis was performed with the Prism 7.01 software (GraphPad).

[0371] 12.2. Results

[0372] The results of the hCXCL10 activity for the ICC and controls are presented in FIGS. 30A, 30B and 30C. Data are expressed relative luminescence (RLU) corresponding to hCXCL10 activity level as function of the CXCR3 β-arrestin recruitment.

[0373] 12.2.1 9G4-SGRS-CXCL10

[0374] Both recombinant hCXCL10 and recombinant hCXCL10+uPA led to a strong activation of the luminescence signal, thereby validating the experiment format. In the absence of uPA, the 9G4-SGRS-CXCL10 ICC had no significant activity. Pre-treatment of the same molecules with uPA resulted in an activity recovery as observed through the CXCR3 β-arrestin recruitment (FIG. 30A).

[0375] In summary, the C-terminal linkage of hCXCL10 using the SGRS linker to the 9G4 antibody attenuates its activity. Cleavage by uPA within the SGRS peptide restores CXCL10 activity almost to that of the free hCXCL10 cytokine.

[0376] 12.2.2 NHS76-SGRS-CXCL10

[0377] Both recombinant hCXCL10 and recombinant hCXCL10+uPA led to a strong activation of the luminescence signal, thereby validating the experiment format. In the absence of uPA, the NHS76-SGRS-CXCL10 ICC had no significant activity. Pre-treatment of the same molecule with uPA resulted in a partial recovery of activity as observed through the CXCR3 β-arrestin recruitment (FIG. 30B). Full activity was not observed probably due to a partial proteolysis of the parent NHS76-SGRS-CXCL10.

[0378] In summary, the C-term linkage of hCXCL10 using SGRS to the NHS76 antibody attenuates its activity. Cleavage by uPA within the SGRS peptide restores CXCL10 activity.

[0379] 12.2.3 H16L16-SGRS-CXCL10

[0380] Both recombinant hCXCL10 and recombinant hCXCL10+uPA led to a strong activation of the luminescence signal, thereby validating the experiment format. In the absence of uPA, the H16/L16-SGRS-CXCL10 ICC had no significant activity. Pre-treatment of the same molecule with uPA resulted in a partially recovery activity as observed through the CXCR3 β-arrestin recruitment (FIG. 30C). Full activity was not observed probably due to a partial proteolysis of the parent H16/L16-SGRS-CXCL10.

[0381] In summary, the C-term linkage of hCXCL10 using SGRS to H16/L16 antibody attenuates its activity. Cleavage by uPA within the SGRS peptide restores CXCL10 activity.

### Example 13: Constructions Used for Expressing Protein Complexes

[0382] A schematic representation of the constructions used in the present study is shown in FIG. 31. These constructions are listed in FIG. 32.

[0383] 13.1. Obtention of the Immunocytokines (ICC)

[0384] Sequences coding for the complete fusion proteins (antibody-linker-cytokine) were cloned into pCDNA3.4 vectors (Thermo FisherScientific) using the HindIII/BamHI restriction sites, including a signal peptide (METDTLLLWVLLLWVPGSTG Thermo FisherScientific). Fusion proteins were obtained by transient protein expression in Expi HEK293 cells (Thermo FisherScientific) grown to a density of 2.5×10⁶ cells/ml in Expi293 Expression Medium (Thermo FisherScientific) and co-transfected with 1.25 μg/ml DNA (HC/LC: 1/1 w/w) using polyethyleneimine (PEI, Polyscience, DNA/PEI ratio: 1/4). 2 mM valproic acid (VPA, Sigma-Aldrich) was then added 3 hours post transfection. Supernatants containing the produced fusion proteins were harvested 6 days post-transfection. The fusion protein yield was measured in each supernatant.

[0385] 13.1. Purification and Characterisation of ICCs

[0386] Proteins were purified by affinity chromatography on Protein A-Sepharose and formulated by overnight dialysis against 25 mM sodium citrate, 150 mM NaCl, 6% Saccharose pH 5.5 or 25 mM His/His-HCl, 150 mM NaCl, pH 6.5.

[0387] Purified ICCs were analysed by SDS-PAGE and Size Exclusion chromatography (SEC). The SEC running buffer corresponded to the formulation buffer of the analysed ICC. At the research level SEC acceptance criterium is 80% monomers.

[0388] As illustrated in FIG. 33, expression of fusion proteins with a cofactor leads to a higher productivity and a lower level of aggregates (i.e., a higher level of monomers). For example, K03201-076 is a fusion protein consisting of the hH16L16 antibody fused to two copies of the L6 linker (PVGLIG) and IL-15. Expression of this protein does not go above 10 mg/L and the monomer rate is 38%. By contrast, expression of sushi+ with this ICC, either as a fusion protein (K03201-072) or through coexpression (K03201-071), results in significant increases in productivity (ca. 60 mg/L and 80 mg/L, respectively) and monomer levels (63% and 86%, respectively). Similar results were obtained with both sushi (K03201-046) and ILR15α (K03201-070).

[0389] Thus, the expression of the fusion protein is significantly enhanced by the cofactor.

### Example 14: Attenuation of IL-15 when Fused to an Antibody

[0390] To evaluate and compare the biological activity of IL-15, when linked to the ICC or after cleavage by MMP9, a bioluminescent cell-based assay designed to measure IL-15 stimulation was performed.

[0391] 14.1. Materials and Methods

[0392] 14.1.1 Materials and Reagents

[0393] Recombinant human pro-MMP-9 was purchased from R&D Systems and activated with 1 mM 4-Aminophenylmercuric acetate (APMA) in buffer containing 50 mM Tris, 150 mM NaCl, 10 mM CaCl₂), 0.05% Brij-35 (w/v), pH7.5. APMA was then removed using Zeba™ Spin Desalting Columns (ThermoFisher Scientific) and APMA-free MMP-9 was immediately stored at −80° C. until needed. Recombinant human IL-15 was purchased from PeproTech.

[0394] IL-15 activity was monitored using the IL-15 Bioassay (Promega). This luciferase reporter bioassay consists of a genetically engineered cell line, which comprises the full cytokine signalling pathway and a reporter gene. This cell emits luminescence upon binding of IL-15 to its receptor. This luminescence can then be detected and quantified with a luminometer. In the absence of IL-15, no signalling occurs downstream of IL-15R and a luminescent signal is not generated.

[0395] 14.1.2 Methods

[0396] The activity of different immunocytokines was assessed. All samples were incubated for 24 hours in presence (+MMP-9) or absence (−MMP-9) of recombinant hMMP-9 in an assay buffer containing 50 mM Tris, 150 mM NaCl, 10 mM CaCl2) pH 7.5 with one molecule of MMP9 for 12 molecules of immunocytokine. Cleavage efficiency was controlled by SDS-PAGE analysis and samples were immediately stored at −20° C. until processing. IL-15 Bioassay cells were treated with either cleaved or uncleaved fusion proteins and controls for 6 hours at 37° C. according to the manufacturers protocol.

[0397] Detection reagent was added, and luminescence intensity was recorded with a microplate reader (Infinite M1000Pro, Tecan). Data analysis was performed with Prism 7.01 software (GraphPad).

[0398] 14.2. Results

[0399] The results of the IL-15-induced luminescence emission for the various immunocytokines tested are presented in FIG. 34 as a function of IL-15 concentration.

[0400] All the molecules tested comprised IL-15 covalently linked to an antibody (H16L16, m9G4, or NHS76) through one or two copies of the linker L6 (PVGLIG). These molecules were expressed with or without different forms of IL-15-Ra (sushi, sushi+ or the entire sIL-15Rα). These cofactors were either covalently linked to the ICC or co-expressed and co purified with the ICC.

[0401] In the absence of MMP-9, the evaluated ICC had no significant activity on IL-15 signalling pathway. None of the evaluated fusion proteins induced light emission. By contrast, pre-treatment of the same molecules with MMP-9 results in recovered cytokine activity through IL-15-induced light emission. The same results were obtained independently of the antibody, the number of linker copies, or of the cofactor. In addition, whether the cofactor is covalently linked or coexpressed with the tested fusion protein does not influence neither IL-15 attenuation in the absence of MMP-9 nor the induction of IL-15 activity in the presence of MMP-9.

[0402] It appears thus clearly from these experiments that IL-15 in each of the various configurations tested shows a highly attenuated cytokine activity when fused to an antibody. After cleavage of the fusion proteins by MMP-9, IL-15 is liberated in its active form and is able to fulfil its biological activity.

### Example 15: In Vitro Evaluation of ICC Constructs in an NK Cell Assay

[0403] Since IL-15 is critical for the development and expansion of NK cells, biological activity of the IL-15 moiety of the ICC, with or without cleavage by MMP9, was measured and evaluated in an assay designed to measure NK cell activation.

[0404] 15.1. Methods

[0405] Murine NK cells were purified from spleen of Balb/c by J mouse (Charles River), using the NK Cell Isolation Kit Mouse and following the manufacturer's instructions (Miltenyi).

[0406] After purification, NK cells were plated at the density of 50 000 cells per well in a 96 multi well plate and incubated with either IL-15 (100 ng/ml) or ICC (dose equivalent to IL-15 100 ng/ml), pre-incubated or not with MMP9. After 72 h incubation, IFNγ was dosed in the supernatant and percentage of NKp46 positive cells as well as CD69 expression were evaluated on NK cells by flow cytometry.

[0407] 15.2. Results

[0408] The results of the NK activation assay for the various immunocytokines tested are displayed in FIG. 35. In particular, the % of CD69+ NK cells and the level of IFNγ produced were determined for each fusion protein, as well as the total number of NKp46 positive cells.

[0409] Each of the tested fusion proteins contained IL-15 covalently linked to an antibody (H16L16, m9G4, or NHS76) through one or two copies of the linker L6 (PVGLIG). These molecules were expressed with or without different forms of IL Ra (sushi+ or the entire sIL-15Rα). These cofactors were either covalently linked to the ICC or co-expressed and co purified with the ICC. In addition, negative controls (naked antibodies) or positive controls (IL-15) were also tested to confirm the validity of the experiment.

[0410] As expected, neither naked antibodies nor uncleaved ICC were able to activate NK cells in the tested conditions. After cleavage, K03201-002 and K03201-073 were not able to activate NK cells, as no IFNγ was detected in the supernatant and there was no CD69 positive cells. After cleavage all other constructs induced higher activation than the rIL-15 introduced as positive control (FIG. 35). On the other hand, activation of NK cells was not observed when these ICCs are uncleaved.

[0411] It appears thus clearly from this experiment that IL-15 shows an attenuated activity when linked to any of the antibodies. After cleavage of the ICC by MMP-9, IL-15 is liberated in its active form and is again able to fulfil its biological activity.

### Example 16: Pharmacokinetic Evaluation

[0412] 16.1. Methods

[0413] The clearance of immunocytokine constructs was assessed in mice following single intravenous administration (bolus dosing at tail vein) of 0.53 nmol in female BALB/cByJ mice i.e. about 20-25 nmol/kg. Animals were housed in accordance with regulations set out in Directive 2010/63/EU of the European Parliament and of the Council of 22 Sep. 2010 and French decree No. 2013-118 of 1 Feb. 2013 (Official Journal of the French Republic of 7 Feb. 2013).

[0414] Blood samples were collected using K2 EDTA micro capillary glass tubes at the following sampling times:

[0415] T 0.5, 1, 3, 6, 24 and 48 hours after dosing (sampling to tail vein) for the first study Erreur ! Source du renvoi introuvable.] and T 0.05, 1, 5, 24, 48, 72, 168 hours after dosing (sampling to saphenous vein) for the second study Erreur ! Source du renvoi introuvable.].

[0416] Animals were monitored during all of the in life experimental phase.

[0417] Plasma were prepared, and 5-fold diluted in PBS, then stored at −80° C. until analysis.

[0418] Concentrations (ng/mL) of total antibody (cleaved and uncleaved ICC) and of total ICC (antibody with at least one remaining IL-15) were determined in plasma samples by ligand binding assay using MesoScale Discovery technology. mAb anti-human IgG (CH2 domain) for total antibody assay and pAb anti-human IL-15 for total ICC assay were used as capture; pAb anti-human IgG (Fc specific) SulfoTAG labelled was used for detection in both assays.

[0419] The area under curve, i.e. AUC(0-last) (h*nmol/L), was calculated from each plasma concentration-time profile using the linear up-log down trapezoidal rule using Phoenix WinNonlin Certara (version 8.1.0).

[0420] To facilitate the comparison, AUC were corrected for the dose expressed in nmol/kg.

[0421] Sample compounds in study 1 evaluated IgG1 and IgG4 isotypes and covalently linked sushi or sushi+ domains. Sample compounds in study 2 evaluated IgG1 and IgG4 isotypes and co-expressed (non-covalent) sushi+ or complete IL-15Rα extracellular domain. Evaluated samples were generated with either a single or double copy of the protease sensitive linker between antibody Fc and IL-15.

[0422] 16.2. Results

[0423] In the first study, all constructs were compared regarding their AUC(0-last)/dose for total antibody which translates to the exposure of animals. Of the 6 ICCs evaluated, the best exposures were obtained for ICC-IL-15-sushi+ covalent constructs (see FIG. 36). Among all constructs, the IgG4 isotype sushi+ construct (K03201-075) displayed the profile closest to that of the parental antibody with an IgG1 isotype, with a plasma exposure equivalent to 74.5% of the parent antibody.

[0424] In the second study, the total antibody plasma exposure of animals for sushi+ and sIL-15Rα constructs were better than for the basic construct (K03201-002) for all construct variants irrespective of linker repeats, isotype or co-expressed factor (see FIG. 37A). The sushi+ simple linker constructs were better tolerated than those with double linkers.

[0425] In addition, the exposure of animals to total ICC for sushi+ and IL-15Rα constructs was determined. The plasma exposure of animals to total ICC was also higher for sushi+ than for sIL-15Rα constructs (see FIG. 37B).

### Example 17: In Vivo Effects of the ICCs on a Renal Carcinoma Cell Line

[0426] 17.1. In Vivo Evaluation of K03201-079 Effect on NK Cells in the RENCA Model

[0427] 17.1.2 Materials and Methods

[0428] Ten to twelve-week-old female Balb/c by J mice (Charles River) were engrafted with 0.5·10⁶ RENCA cells, subcutaneously using a needle for each mouse. Mice were maintained in individual cages (10 mice/cage) at constant temperature and humidity in accordance with regulations set out in Directive 2010/63/EU of the European Parliament and of the Council of 22 Sep. 2010 and French decree No. 2013-118 of 1 Feb. 2013 (Official Journal of the French Republic of 7 Feb. 2013).

[0429] Eleven days after cell engraftment, when tumours reached around 100 mm³, mice were randomised and allocated in treatment groups (8 mice per group). Mice received IV injection of either vehicle or K03201-079 dosed at 10 μg, 20 μg and 50 μg, at DO and D3 post-randomisation.

[0430] Twenty-four hours post last injection, mice were euthanised and tumours were sampled for flow cytometry analysis of the NK cell population.

[0431] Briefly, tumours were dissociated using the Tumour Dissociation Kit Mouse (Miltenyi) and the Gentle MACS Octo Dissociator (protocol 37C_m_TDK_2) (Miltenyi). Tumour cell suspensions were filtered on 70 μm Smart Stainers and count with ViCell. Tumour cell suspensions were then centrifuged and cell concentration adjusted to 20·10⁶ cells/mL in cold FACS buffer.

[0432] 2·10⁶ of tumour cell suspension were plated on 96 well plate with V bottom, Fc Receptor on cells were blocked using FcR Blocking Reagent Mouse, and then 10 μg/mL of alone or mixed fluorescent antibodies were added in each well, and samples were analysed by flow cytometry.

[0433] 17.1.2 Results

[0434] K03201-079 comprises the IL-15 cytokine bound to the H16L16 antibody (ganitumab) through the L6 linker and co-expressed with sushi +. A dose-dependent increase of the number of NK cells within the tumours is induced following administration of K03201-079 (see FIG. 38A). IL-15 is thus targeted correctly to the tumour where it induces the expected immune response.

[0435] 17.1. In Vivo Comparison of K03201-079 and rIL-15 Effect on NK Cells in the RENCA Model

[0436] 17.1.2 Materials and Methods

[0437] Ten to twelve-week-old female Balb/c by J mice (Charles River) were engrafted with 0.5·10⁶ RENCA cells, subcutaneously using a needle for each mouse. Mice were maintained in individual cages (10 mice/cage) at constant temperature and humidity following European Guidelines recommendations.

[0438] Eleven days after cell engraftment, when tumours reached around 100 mm³, mice were randomised and allocated in groups of treatment (8 mice per group). Mice received IV injection of either vehicle, K03201-079 dosed at 20 μg or subcutaneous injection of rIL-151L-15 dosed at 6 μg (equivalent dose to 20 μg of K033201-079) at DO post-randomisation.

[0439] Ninety-six hours post last injection, mice were euthanised and tumours were sampled for flow cytometry analysis of the NK cell population.

[0440] Briefly, tumours were dissociated using the Tumour Dissociation Kit Mouse (Miltenyi) and the Gentle MACS Octo Dissociator (protocol 37C_m_TDK_2) (Miltenyi). Tumour cell suspensions were filtered on 70 μm Smart Strainers and enumerated by ViCell. Tumour cell suspensions were then centrifuged and cell concentration adjusted to 20·10⁶ cells/mL in cold FACS buffer.

[0441] Then 2·10⁶ of tumour cell suspension was plated in 96 well plates with V bottoms. Fc Receptor on cells were blocked using FcR Blocking Reagent Mouse, and then 10 μg/mL of simple or mixed fluorescent antibodies were added in each well, and the samples were analysed by flow cytometry.

[0442] 17.2.2 Results

[0443] When rIL-15 was injected subcutaneously at 6 μg, no increase of the NK cell number was observed within the tumours. However, the equivalent dose of IL-15 administrated via the K03201-079 is able to induce a 4.8 increase of the NK cell number in the tumours (see FIG. 38B).

1. A protein complex comprising:
(i) a fusion protein comprising an antibody, or antigen-binding fragment thereof, a cleavable peptide linker, and IL-15 or a functional fragment thereof; and
(ii) a cofactor, wherein said cofactor is IL-15Rα or an IL-15-binding fragment thereof.

2. The protein complex of claim 1, wherein the IL-15-binding fragment is selected in the group consisting of: soluble IL-15Rα of SEQ ID NO. 53, IL-15Rα sushi of SEQ ID NO. 51, and IL-15Rα sushi+ of SEQ ID NO. 52.

3. The protein complex of claim 1 or 2, wherein the cleavable peptide linker comprises a protease cleavage site.

4. The protein complex of any one of claims 1 to 3, wherein the protease cleavage site is cleaved by a matrix metalloproteinase or by uPA.

5. The protein complex of claim 4, wherein the matrix metalloproteinase is MMP-2, MMP-9.

6. The protein complex of any one of claims 1 to 5, wherein the cleavable peptide linker has a sequence selected from the group consisting of: GPLGIAGQ, GPLGLWAQ, GPLGMLSQ, PLGLAG, PVGLIG, SGRS, SGRSA, and PSSSRRRVN.

7. The protein complex of any one of claims 1 to 6, wherein the antibody or antigen-binding fragment thereof is selected from the group consisting of polyclonal antibodies, monoclonal antibodies, chimeric antibodies, humanised antibodies, scFv, single domain antibodies (e.g., shark and camelid antibodies), maxibodies, minibodies, intrabodies, diabodies, triabodies, tetrabodies, v-NAR and bis-scFv.

8. The protein complex of any one of claims 1 to 7, wherein:
(i) IL-15 or the functional fragment thereof is fused to the cleavable peptide linker, and
(ii) the cleavable peptide linker is used N-terminally or C-terminally to the antibody or antigen-binding fragment thereof.

9. The protein complex of any one of claims 1 to 8, wherein:
(i) IL-15 or the functional fragment thereof is fused to the cleavable peptide linker, and
(ii) the cleavable peptide linker is fused N-terminally or C-terminally to the heavy chain of the antibody or antigen-binding fragment thereof.

10. The protein complex of any one of claims 1 to 9, wherein the cofactor is bound covalently to the fusion protein.

11. The protein complex of claim 10, wherein the cofactor is linked to IL-15.

12. The protein complex of any one of claims 1 to 9, wherein the cofactor is bound non-covalently to the fusion protein.

13. The protein complex of any one of claims 1 to 12 for use in stimulating an immune response in a subject.

14. The protein complex of claim 13, wherein the immune response involves expanding one or several lymphocyte populations, such as NK cells, NK-T cells, CD8⁺ T cells.

15. The protein complex of any one of claims 1 to 12 for use in therapy.

16. The protein complex of any of claims 1 to 12 for use in the treatment of cancer in a subject.

17. The fusion protein for use according to claim 16, wherein said use comprises activation of immune cell, preferably T-cells or monocytes, of said subject.

18. A pharmaceutical composition comprising at least one protein complex according to any one of claims 1 to 12 and optionally a pharmaceutically acceptable excipient.

The application's sequence listing, which the Patent Office published only in electronic form, follows.

SEQUENCE LISTING (244 sequences)

SEQ ID NO: 1 - DNA, 354 bp, Artificial
  Atezolizumab Heavy Chain Variable Region
gaggtccagcttgtcgagtcaggtggaggtcttgtacagccaggaggaagtttgcgtttgagctgcgctgcttctgggttcacttttagcgactcctggatccactgggtcagacaggcacctggaaaggggctggaatgggttgcatggatttccccctacggcggctctacttattacgctgacagtgttaaaggcaggtttaccataagcgccgacacctccaaaaacaccgcctacctgcagatgaatagtctgcgagccgaagatactgccgtgtactattgcgcccggcgccattggcccggcggctttgattattgggggcaagggacactggtgacagtgtctgct

SEQ ID NO: 2 - protein, 118 aa, Artificial
  Atezolizumab Heavy Chain Variable Region
EVQLVESGGGLVQPGGSLRLSCAASGFTFSDSWIHWVRQAPGKGLEWVAWISPYGGSTYYADSVKGRFTISADTSKNTAYLQMNSLRAEDTAVYYCARRHWPGGFDYWGQGTLVTVSA

SEQ ID NO: 3 - DNA, 320 bp, Artificial
  Atezolizumab Light Chain Variable Region
gacatccagatgacccaatccccatcctccttgagcgcatctgtaggagacagagtcaccatcacctgcagggcttcacaggatgttagcacagctgtggcttggtaccagcagaaacctggaaaggccccaaaactgctgatatacagcgcctcattcctgtacagcggagtgccctctcgctttagtggctctgggagtggcactgatttcacactgactatttctagtctgcagcccgaagatttcgccacttactattgccagcagtatctctatcaccccgccacctttgggcagggcacaaaggtcgagattaa

SEQ ID NO: 4 - protein, 107 aa, Artificial [sequence omitted]

SEQ ID NO: 5 - DNA, 357 bp, Artificial
  Ganitumab Heavy Chain Variable Region
caggtgcagctgcaggagtcgggcccaggactggtgaagccttcggggaccctgtccctcacctgcgctgtctctggtggctccatcagcagtagtaactggtggagttgggtccgccagcccccagggaaggggctggagtggattggggaaatctatcatagtgggagcaccaactacaacccgtccctcaagagtcgagtcaccatatcagtagacaagtccaagaaccagttctccctgaagctgagctctgtgaccgccgcggacacggccgtgtattactgtgcgagatggaccgggcgtactgatgcttttgatatctggggccaagggacaatggtcaccgtctcaagc

SEQ ID NO: 6 - protein, 119 aa, Artificial [sequence omitted]

SEQ ID NO: 7 - DNA, 336 bp, Artificial
  Ganitumab Light Chain Variable Region
gatgttgtgatgactcagtctccactctccctgcccgtcacccctggagagccggcctccatctcctgcaggtctagtcagagcctcctgcatagtaatggatacaactatttggattggtacctgcagaagccagggcagtctccacagctcctgatctatttgggttctaatcgggcctccggggtccctgacaggttcagtggcagtggatcaggcacagattttacactgaaaatcagcagggtggaggctgaggatgttggggtttattactgcatgcaaggtacacactggcctctgacgttcggccaagggaccaaggtggagatcaaa

SEQ ID NO: 8 - protein, 112 aa, Artificial [sequence omitted]

SEQ ID NO: 9 - DNA, 351 bp, Artificial
  NHS76 Heavy Chain Variable Region
caggtgcagctgcaggagtccggcccaggactggtgaagccttcggagaccctgtccctcacctgcgctgtctctggttactccatcagcagtggttactactggggctggattcggcagcccccagggaaggggctggagtggattgggagtatctatcatagtgggagcacctactacaacccgtccctcaagagtcgagtcaccatatcagtagacacgtccaagaaccagttctccctgaagctgagctctgtgaccgccgcagacacggccgtgtattactgtgcaagagggaagtggtcgaagtttgactattggggccaaggcaccctggtcaccgtctcttca

SEQ ID NO: 10 - protein, 117 aa, Artificial
  NHS76 Heavy Chain Variable Region
QVQLQESGPGLVKPSETLSLTCAVSGYSISSGYYWGWIRQPPGKGLEWIGSIYHSGSTYYNPSLKSRVTISVDTSKNQFSLKLSSVTAADTAVYYCARGKWSKFDYWGQGTLVTVSS

SEQ ID NO: 11 - DNA, 324 bp, Artificial
  NHS76 Light Chain Variable Region
tcctctgagctgactcaggaccctgctgtgtctgtggccttgggacagacagtcaggatcacatgccaaggagacagcctcagaagctattatgcaagctggtaccagcagaagccaggacaggcccctgtacttgtcatctatggtaaaaacaaccggccctcagggattccagaccgattctctggctccagctcaggaaacacagcttccttgaccatcactggggctcaggcggaagatgaggctgactattactgtaactcccgggacagcagtggtaaccatgtggtattcggcggagggaccaagctgaccgtccta

SEQ ID NO: 12 - protein, 108 aa, Artificial
  NHS76 Light Chain Variable Region
SSELTQDPAVSVALGQTVRITCQGDSLRSYYASWYQQKPGQAPVLVIYGKNNRPSGIPDRFSGSSSGNTASLTITGAQAEDEADYYCNSRDSSGNHVVFGGGTKLTVL

SEQ ID NO: 13 - DNA, 339 bp, Artificial
  9G4 Heavy Chain Variable Region
gaagtgatgttggtggagtctgggggaggcttagtgaagcctggagggtccctgaaactctcctgtacagcctctggattcactttcagtacctatgacatgtcttgggttcgccagactccggagaagaggctggagtgggtctcaaccattagtagtagtcgtacttacacctactattcagccagtgtgaaggggcgattcaccatctccagagacaatgccaggaacatcctgtacctgcaaatgagcagtctgaggtctgaggacacggccatgtattactgtgcaagacaattttctcactggggccaagggactctggtcactgtctctgca

SEQ ID NO: 14 - protein, 113 aa, Artificial
  9G4 Heavy Chain Variable Region
EVMLVESGGGLVKPGGSLKLSCTASGFTFSTYDMSWVRQTPEKRLEWVSTISSSRTYTYYSASVKGRFTISRDNARNILYLQMSSLRSEDTAMYYCARQFSHWGQGTLVTVSA

SEQ ID NO: 15 - DNA, 336 bp, Artificial
  9G4 Light Chain Variable Region
gatgttgtgatgacccagactccactcactttgtcggttaccattggacaaccagcctccatctcttgcaagtcaagtcagagcctcttagatagtgatggaaagacatatttgaattggttgttacagaggccaggccagtctccaacgcgcctaatctatctggtgtctaaactggactctggagtccctgacaggttcactggcagtggatcagggacagatttcacactgaagatcagcagagtggaggctgaggatttgggagtttattattgctggcaaggtacacattttcctcacacgttcggaggggggaccaagctggaaataaaa

SEQ ID NO: 16 - protein, 112 aa, Artificial
  9G4 Light Chain Variable Region
DVVMTQTPLTLSVTIGQPASISCKSSQSLLDSDGKTYLNWLLQRPGQSPTRLIYLVSKLDSGVPDRFTGSGSGTDFTLKISRVEAEDLGVYYCWQGTHFPHTFGGGTKLEIK

SEQ ID NO: 17 - DNA, 987 bp, Human
gcgtccacaaagggcccaagcgtgttcccgctagcccccagcagcaagagcaccagcggcggcacagccgccctgggctgcctggtgaaggactacttccccgagcccgtgaccgtgtcctggaacagcggagccctgacctccggcgtgcacaccttccccgccgtgctgcagagcagcggcctgtacagcctgagcagcgtggtgaccgtgcccagcagcagcctgggcacccagacctacatctgtaacgtgaaccacaagcccagcaacaccaaggtggacaagagagtggagcccaagagctgtgacaagacccacacctgtcccccctgcccagcccccgagctgctgggcggacccagcgtgttcctgttcccccccaagcccaaggacaccctgatgatcagcagaacccccgaggtgacctgtgtggtggtggacgtgtcccacgaggacccagaggtgaagttcaactggtacgtggacggcgtggaggtgcacaacgccaagaccaagcccagagaggagcagtacaacagcacctacagggtggtgtccgtgctgaccgtgctgcaccaggactggctgaacggcaaggagtacaagtgtaaggtgtccaacaaggccctgccagccccaatcgaaaagaccatcagcaaggccaagggccagccaagagagccccaggtgtacaccctgccacccagcagggaggagatgaccaagaaccaggtgtccctgacctgtctggtgaagggcttctacccaagcgacatcgccgtggagtgggagagcaacggccagcccgagaacaactacaagaccacccccccagtgctggacagcgacggcagcttcttcctgtacagcaagctgaccgtggacaagagcagatggcagcagggcaacgtgttcagctgctccgtgatgcacgaggccctgcacaaccactacacccagaagagcctgagcctgtccccaggc

SEQ ID NO: 18 - protein, 329 aa, Human
ASTKGPSVFPLAPSSKSTSGGTAALGCLVKDYFPEPVTVSWNSGALTSGVHTFPAVLQSSGLYSLSSVVTVPSSSLGTQTYICNVNHKPSNTKVDKRVEPKSCDKTHTCPPCPAPELLGGPSVFLFPPKPKDTLMISRTPEVTCVVVDVSHEDPEVKFNWYVDGVEVHNAKTKPREEQYNSTYRVVSVLTVLHQDWLNGKEYKCKVSNKALPAPIEKTISKAKGQPREPQVYTLPPSREEMTKNQVSLTCLVKGFYPSDIAVEWESNGQPENNYKTTPPVLDSDGSFFLYSKLTVDKSRWQQGNVFSCSVMHEALHNHYTQKSLSLSPG

SEQ ID NO: 19 - DNA, 978 bp, Human
gcgtccacaaagggccccagcgtgttccctctggccccctgcagcagaagcaccagcgagtctacagccgccctgggatgcctggtcaaggactacttccccgagcccgtgaccgtgtcctggaactctggcgccctgaccagcggcgtgcacacctttccagccgtgctgcagagcagcggcctgtacagcctgagcagcgtcgtgaccgtgcctagcagcagcctgggcaccaagacctacacctgtaacgtggaccacaagcccagcaacaccaaggtggacaagcgggtggaatctaagtacggccctccctgccccccctgcccagcccctgaatttctgggcggaccctccgtgttcctgttccccccaaagcccaaggacaccctgatgatcagccggacccccgaagtgacctgcgtggtggtggacgtgtcccaggaagatcccgaggtccagttcaactggtacgtggacggcgtggaagtgcacaacgccaagaccaagcccagagaggaacagttcaacagcacctaccgggtggtgtccgtgctgaccgtgctgcaccaggactggctgaacggcaaagagtacaagtgcaaggtctccaacaagggcctgcccagctccatcgagaaaaccatcagcaaggccaagggccagccccgcgagccccaggtgtacacactgccccccagccaggaagagatgaccaagaaccaggtgtccctgacctgcctcgtgaagggcttctaccccagcgatatcgccgtggaatgggagagcaacggccagcccgagaacaactacaagaccaccccccctgtgctggacagcgacggcagcttcttcctgtactcccggctgaccgtcgacaagtctagatggcaggaaggcaacgtcttcagctgcagcgtgatgcacgaggccctgcacaaccactacacccagaagtccctgagcctgagcctggga

SEQ ID NO: 20 - protein, 326 aa, Human
ASTKGPSVFPLAPCSRSTSESTAALGCLVKDYFPEPVTVSWNSGALTSGVHTFPAVLQSSGLYSLSSVVTVPSSSLGTKTYTCNVDHKPSNTKVDKRVESKYGPPCPPCPAPEFLGGPSVFLFPPKPKDTLMISRTPEVTCVVVDVSQEDPEVQFNWYVDGVEVHNAKTKPREEQFNSTYRVVSVLTVLHQDWLNGKEYKCKVSNKGLPSSIEKTISKAKGQPREPQVYTLPPSQEEMTKNQVSLTCLVKGFYPSDIAVEWESNGQPENNYKTTPPVLDSDGSFFLYSRLTVDKSRWQEGNVFSCSVMHEALHNHYTQKSLSLSLG

SEQ ID NO: 21 - DNA, 321 bp, Human
cgtacggtggccgctcccagcgtgttcatcttcccacccagcgacgagcagctgaagtctggcaccgccagcgtcgtgtgcctgctgaacaacttctacccccgcgaggccaaggtgcagtggaaggtggacaacgccctgcagtccggcaacagccaggaaagcgtcaccgagcaggacagcaaggactccacctacagcctgagcagcaccctgaccctgagcaaggccgactacgagaagcacaaggtgtacgcctgcgaagtgacccaccagggcctgtccagccccgtgaccaagagcttcaaccggggcgagtgc

SEQ ID NO: 22 - protein, 107 aa, Human [sequence omitted]

SEQ ID NO: 23 - DNA, 318 bp, Human
ggtcaacccaaggccgctcccagcgtgaccctgttccccccctcgagcgaggagctgcaggccaacaaggccaccctggtgtgtctgatcagcgacttctacccaggcgccgtgaccgtggcctggaaggccgacagcagccccgtgaaggccggcgtggagaccaccacccccagcaagcagagcaacaacaagtacgccgccagcagctacctgagcctgaccccagagcagtggaagagccacaggagctacagctgccaggtcacccacgagggcagcaccgtggaaaagaccgtggccccaaccgagtgctcc

SEQ ID NO: 24 - protein, 106 aa, Human
GQPKAAPSVTLFPPSSEELQANKATLVCLISDFYPGAVTVAWKADSSPVKAGVETTTPSKQSNNKYAASSYLSLTPEQWKSHRSYSCQVTHEGSTVEKTVAPTECS

SEQ ID NO: 25 - DNA, 342 bp, Human
aactgggtgaatgtaataagtgatttgaaaaaaattgaagatcttattcaatctatgcatattgatgctactttatatacggaaagtgatgttcaccccagttgcaaagtaacagcaatgaagtgctttctcttggagttacaagttatttcacttgagtccggagatgcaagtattcatgatacagtagaaaatctgatcatcctagcaaacaacagtttgtcttctaatgggaatgtaacagaatctggatgcaaagaatgtgaggaactggaggaaaaaaatattaaagaatttttgcagagttttgtacatattgtccaaatgttcatcaacacttct

SEQ ID NO: 26 - protein, 114 aa, Human
NWVNVISDLKKIEDLIQSMHIDATLYTESDVHPSCKVTAMKCFLLELQVISLESGDASIHDTVENLIILANNSLSSNGNVTESGCKECEELEEKNIKEFLQSFVHIVQMFINTS

SEQ ID NO: 27 - DNA, 399 bp, Human
gcacctacctcgagttctacaaagaaaacacagctacaactggagcatttactgctggatttacagatgattttgaatggaattaataattacaagaatcccaaactcaccaggatgctcacatttaagttttacatgcccaagaaggccacagaactgaaacatcttcagtgtctagaagaagaactcaaacctctggaggaagtgctaaatttagctcaaagcaaaaactttcacttaagacccagggacttaatcagcaatatcaacgtaatagttctggaactaaagggatctgaaacaacattcatgtgtgaatatgctgatgagacagcaaccattgtagaatttctgaacagatggattaccttttgtcaaagcatcatctcaacactgact

SEQ ID NO: 28 - protein, 133 aa, Human [sequence omitted]

SEQ ID NO: 29 - DNA, 207 bp, Human
gcaccaatgggctcagaccctcccaccgcctgctgcttttcttacaccgcgaggaaacttcctcgcaactttgtggtagattactatgagaccagcagcctctgctcccagccagctgtggtattccaaaccaaaagaagcaagcaagtctgtgctgatcccagtgaatcctgggtccaggagtacgtgtatgacctggaactgaac

SEQ ID NO: 30 - protein, 69 aa, Human
APMGSDPPTACCFSYTARKLPRNFVVDYYETSSLCSQPAVVFQTKRSKQVCADPSESWVQEYVYDLELN

SEQ ID NO: 31 - DNA, 495 bp, Human
tgtgatctgcctcaaacccacagcctgggtagcaggaggaccttgatgctcctggcacagatgaggaaaatctctcttttctcctgcttgaaggacagacatgactttggatttccccaggaggagtttggcaaccagttccaaaaggctgaaaccatccctgtcctccatgagatgatccagcagatcttcaatctcttcagcacaaaggactcatctgctgcttgggatgagaccctcctagacaaattctacactgaactctaccagcagctgaatgacctggaagcctgtgtgatacagggggtgggggtgacagagactcccctgatgaaggaggactccattctggctgtgaggaaatacttccaaagaatcactctctatctgaaagagaagaaatacagcccttgtgcctgggaggttgtcagagcagaaatcatgagatctttttctttgtcaacaaacttgcaagaaagtttaagaagtaaggaa

SEQ ID NO: 32 - protein, 165 aa, Human
CDLPQTHSLGSRRTLMLLAQMRKISLFSCLKDRHDFGFPQEEFGNQFQKAETIPVLHEMIQQIFNLFSTKDSSAAWDETLLDKFYTELYQQLNDLEACVIQGVGVTETPLMKEDSILAVRKYFQRITLYLKEKKYSPCAWEVVRAEIMRSFSLSTNLQESLRSKE

SEQ ID NO: 33 - DNA, 513 bp, Oplophorus gracilirostris
atggtcttcacactcgaagatttcgttggggactggcgacagacagccggctacaacctggaccaagtccttgaacagggaggtgtgtccagtttgtttcagaatctcggggtgtccgtaactccgatccaaaggattgtcctgagcggtgaaaatgggctgaagatcgacatccatgtcatcatcccgtatgaaggtctgagcggcgaccaaatgggccagatcgaaaaaatttttaaggtggtgtaccctgtggatgatcatcactttaaggtgatcctgcactatggcacactggtaatcgacggggttacgccgaacatgatcgactatttcggacggccgtatgaaggcatcgccgtgttcgacggcaaaaagatcactgtaacagggaccctgtggaacggcaacaaaattatcgacgagcgcctgatcaaccccgacggctccctgctgttccgagtaaccatcaacggagtgaccggctggcggctgtgcgaacgcattctggcg

SEQ ID NO: 34 - protein, 173 aa, Oplophorus gracilirostris
LEMVFTLEDFVGDWRQTAGYNLDQVLEQGGVSSLFQNLGVSVTPIQRIVLSGENGLKIDIHVIIPYEGLSGDQMGQIEKIFKVVYPVDDHHFKVILHYGTLVIDGVTPNMIDYFGRPYEGIAVFDGKKITVTGTLWNGNKIIDERLINPDGSLLFRVTINGVTGWRLCERILA

SEQ ID NO: 35 - DNA, 18 bp, Artificial
  linker
ccgctgggcctggcgggc

SEQ ID NO: 36 - protein, 6 aa, Artificial
  linker
PLGLAG

SEQ ID NO: 37 - DNA, 24 bp, Artificial
  linker
ggcccgctgggcattgcgggccag

SEQ ID NO: 38 - protein, 8 aa, Artificial
  linker
GPLGIAGQ

SEQ ID NO: 39 - DNA, 24 bp, Artificial
  linker
ggcccgctgggcctgtgggcgcag

SEQ ID NO: 40 - protein, 8 aa, Artificial
  linker
GPLGLWAQ

SEQ ID NO: 41 - DNA, 24 bp, Artificial
  linker
ggcccgctgggcatgctgagccag

SEQ ID NO: 42 - protein, 8 aa, Artificial
  linker
GPLGMLSQ

SEQ ID NO: 43 - DNA, 18 bp, Artificial
  linker
ccggtgggcctgattggc

SEQ ID NO: 44 - protein, 6 aa, Artificial
  linker
PVGLIG

SEQ ID NO: 45 - DNA, 18 bp, Artificial
  linker
ggcattgtgggaccgctg

SEQ ID NO: 46 - protein, 6 aa, Artificial
  linker
GIVGPL

SEQ ID NO: 47 - DNA, 6 bp, Artificial
  linker
ctcgag

SEQ ID NO: 48 - protein, 2 aa, Artificial
  linker
LE

SEQ ID NO: 49 - DNA, 1704 bp, Artificial
  Heavy Chain of Ganitumab-PVGLIG-IL15
caggtgcagctgcaggagtcgggaccaggactggtgaagccttcggggaccctgtccctcacctgcgctgtctctggtggctccatcagcagtagtaactggtggagttgggtccgccagcccccagggaaggggctggagtggattggggaaatctatcatagtgggagcaccaactacaacccgtccctcaagagtcgagtcaccatatcagtagacaagtccaagaaccagttctccctgaagctgagctctgtgaccgccgcggacacggccgtgtattactgtgcgagatggaccgggcgtactgatgcttttgatatctggggccaagggacaatggtcaccgtctcaagcgcgtccacaaagggcccaagcgtgttcccgctagcccccagcagcaagagcaccagcggcggcacagccgccctgggctgcctggtgaaggactacttccccgagcccgtgaccgtgtcctggaacagcggagccctgacctccggcgtgcacaccttccccgccgtgctgcagagcagcggcctgtacagcctgagcagcgtggtgaccgtgcccagcagcagcctgggcacccagacctacatctgtaacgtgaaccacaagcccagcaacaccaaggtggacaagagagtggagcccaagagctgtgacaagacccacacctgtcccccctgcccagcccccgagctgctgggcggacccagcgtgttcctgttcccccccaagcccaaggacaccctgatgatcagcagaacccccgaggtgacctgtgtggtggtggacgtgtcccacgaggacccagaggtgaagttcaactggtacgtggacggcgtggaggtgcacaacgccaagaccaagcccagagaggagcagtacaacagcacctacagggtggtgtccgtgctgaccgtgctgcaccaggactggctgaacggcaaggagtacaagtgtaaggtgtccaacaaggccctgccagccccaatcgaaaagaccatcagcaaggccaagggccagccaagagagccccaggtgtacaccctgccacccagcagggaggagatgaccaagaaccaggtgtccctgacctgtctggtgaagggcttctacccaagcgacatcgccgtggagtgggagagcaacggccagcccgagaacaactacaagaccacccccccagtgctggacagcgacggcagcttcttcctgtacagcaagctgaccgtggacaagagcagatggcagcagggcaacgtgttcagctgctccgtgatgcacgaggccctgcacaaccactacacccagaagagcctgagcctgtccccaggcccggtgggcctgattggcaactgggtgaatgtaataagtgatttgaaaaaaattgaagatcttattcaatctatgcatattgatgctactttatatacggaaagtgatgttcaccccagttgcaaagtaacagcaatgaagtgctttctcttggagttacaagttatttcacttgagtccggagatgcaagtattcatgatacagtagaaaatctgatcatcctagcaaacaacagtttgtcttctaatgggaatgtaacagaatctggatgcaaagaatgtgaggaactggaggaaaaaaatattaaagaatttttgcagagttttgtacatattgtccaaatgttcatcaacacttct

SEQ ID NO: 50 - protein, 568 aa, Artificial
  Heavy Chain of Ganitumab-PVGLIG-IL15
QVQLQESGPGLVKPSGTLSLTCAVSGGSISSSNWWSWVRQPPGKGLEWIGEIYHSGSTNYNPSLKSRVTISVDKSKNQFSLKLSSVTAADTAVYYCARWTGRTDAFDIWGQGTMVTVSSASTKGPSVFPLAPSSKSTSGGTAALGCLVKDYFPEPVTVSWNSGALTSGVHTFPAVLQSSGLYSLSSVVTVPSSSLGTQTYICNVNHKPSNTKVDKRVEPKSCDKTHTCPPCPAPELLGGPSVFLFPPKPKDTLMISRTPEVTCVVVDVSHEDPEVKFNWYVDGVEVHNAKTKPREEQYNSTYRVVSVLTVLHQDWLNGKEYKCKVSNKALPAPIEKTISKAKGQPREPQVYTLPPSREEMTKNQVSLTCLVKGFYPSDIAVEWESNGQPENNYKTTPPVLDSDGSFFLYSKLTVDKSRWQQGNVFSCSVMHEALHNHYTQKSLSLSPGPVGLIGNWVNVISDLKKIEDLIQSMHIDATLYTESDVHPSCKVTAMKCFLLELQVISLESGDASIHDTVENLIILANNSLSSNGNVTESGCKECEELEEKNIKEFLQSFVHIVQMFINTS

SEQ ID NO: 51 - DNA, 1698 bp, Artificial
  Heavy Chain of NHS76-PVGLIG-IL15
caggtgcagctgcaggagtccggcccaggactggtgaagccttcggagaccctgtccctcacctgcgctgtctctggttactccatcagcagtggttactactggggctggattcggcagcccccagggaaggggctggagtggattgggagtatctatcatagtgggagcacctactacaacccgtccctcaagagtcgagtcaccatatcagtagacacgtccaagaaccagttctccctgaagctgagctctgtgaccgccgcagacacggccgtgtattactgtgcaagagggaagtggtcgaagtttgactattggggccaaggcaccctggtcaccgtctcttcagcgtccacaaagggcccaagcgtgttcccgctagcccccagcagcaagagcaccagcggcggcacagccgccctgggctgcctggtgaaggactacttccccgagcccgtgaccgtgtcctggaacagcggagccctgacctccggcgtgcacaccttccccgccgtgctgcagagcagcggcctgtacagcctgagcagcgtggtgaccgtgcccagcagcagcctgggcacccagacctacatctgtaacgtgaaccacaagcccagcaacaccaaggtggacaagagagtggagcccaagagctgtgacaagacccacacctgtcccccctgcccagcccccgagctgctgggcggacccagcgtgttcctgttcccccccaagcccaaggacaccctgatgatcagcagaacccccgaggtgacctgtgtggtggtggacgtgtcccacgaggacccagaggtgaagttcaactggtacgtggacggcgtggaggtgcacaacgccaagaccaagcccagagaggagcagtacaacagcacctacagggtggtgtccgtgctgaccgtgctgcaccaggactggctgaacggcaaggagtacaagtgtaaggtgtccaacaaggccctgccagccccaatcgaaaagaccatcagcaaggccaagggccagccaagagagccccaggtgtacaccctgccacccagcagggaggagatgaccaagaaccaggtgtccctgacctgtctggtgaagggcttctacccaagcgacatcgccgtggagtgggagagcaacggccagcccgagaacaactacaagaccacccccccagtgctggacagcgacggcagcttcttcctgtacagcaagctgaccgtggacaagagcagatggcagcagggcaacgtgttcagctgctccgtgatgcacgaggccctgcacaaccactacacccagaagagcctgagcctgtccccaggcccggtgggcctgattggcaactgggtgaatgtaataagtgatttgaaaaaaattgaagatcttattcaatctatgcatattgatgctactttatatacggaaagtgatgttcaccccagttgcaaagtaacagcaatgaagtgctttctcttggagttacaagttatttcacttgagtccggagatgcaagtattcatgatacagtagaaaatctgatcatcctagcaaacaacagtttgtcttctaatgggaatgtaacagaatctggatgcaaagaatgtgaggaactggaggaaaaaaatattaaagaatttttgcagagttttgtacatattgtccaaatgttcatcaacacttct

SEQ ID NO: 52 - protein, 566 aa, Artificial
  Heavy Chain of NHS76-PVGLIG-IL15
QVQLQESGPGLVKPSETLSLTCAVSGYSISSGYYWGWIRQPPGKGLEWIGSIYHSGSTYYNPSLKSRVTISVDTSKNQFSLKLSSVTAADTAVYYCARGKWSKFDYWGQGTLVTVSSASTKGPSVFPLAPSSKSTSGGTAALGCLVKDYFPEPVTVSWNSGALTSGVHTFPAVLQSSGLYSLSSVVTVPSSSLGTQTYICNVNHKPSNTKVDKRVEPKSCDKTHTCPPCPAPELLGGPSVFLFPPKPKDTLMISRTPEVTCVVVDVSHEDPEVKFNWYVDGVEVHNAKTKPREEQYNSTYRVVSVLTVLHQDWLNGKEYKCKVSNKALPAPIEKTISKAKGQPREPQVYTLPPSREEMTKNQVSLTCLVKGFYPSDIAVEWESNGQPENNYKTTPPVLDSDGSFFLYSKLTVDKSRWQQGNVFSCSVMHEALHNHYTQKSLSLSPGPVGLIGNWVNVISDLKKIEDLIQSMHIDATLYTESDVHPSCKVTAMKCFLLELQVISLESGDASIHDTVENLIILANNSLSSNGNVTESGCKECEELEEKNIKEFLQSFVHIVQMFINTS

SEQ ID NO: 53 - DNA, 657 bp, Artificial
  Ganitumab Light Chain
gatgttgtgatgactcagtctccactctccctgcccgtcacccctggagagccggcctccatctcctgcaggtctagtcagagcctcctgcatagtaatggatacaactatttggattggtacctgcagaagccagggcagtctccacagctcctgatctatttgggttctaatcgggcctccggggtccctgacaggttcagtggcagtggatcaggcacagattttacactgaaaatcagcagggtggaggctgaggatgttggggtttattactgcatgcaaggtacacactggcctctgacgttcggccaagggaccaaggtggagatcaaacgtacggtggccgctcccagcgtgttcatcttcccacccagcgacgagcagctgaagtctggcaccgccagcgtcgtgtgcctgctgaacaacttctacccccgcgaggccaaggtgcagtggaaggtggacaacgccctgcagtccggcaacagccaggaaagcgtcaccgagcaggacagcaaggactccacctacagcctgagcagcaccctgaccctgagcaaggccgactacgagaagcacaaggtgtacgcctgcgaagtgacccaccagggcctgtccagccccgtgaccaagagcttcaaccggggcgagtgc

SEQ ID NO: 54 - protein, 219 aa, Artificial
  Ganitumab Light Chain
DVVMTQSPLSLPVTPGEPASISCRSSQSLLHSNGYNYLDWYLQKPGQSPQLLIYLGSNRASGVPDRFSGSGSGTDFTLKISRVEAEDVGVYYCMQGTHWPLTFGQGTKVEIKRTVAAPSVFIFPPSDEQLKSGTASVVCLLNNFYPREAKVQWKVDNALQSGNSQESVTEQDSKDSTYSLSSTLTLSKADYEKHKVYACEVTHQGLSSPVTKSFNRGEC

SEQ ID NO: 55 - DNA, 645 bp, Artificial
  NHS76 Light Chain
tcctctgagctgactcaggaccctgctgtgtctgtggccttgggacagacagtcaggatcacatgccaaggagacagcctcagaagctattatgcaagctggtaccagcagaagccaggacaggcccctgtacttgtcatctatggtaaaaacaaccggccctcagggattccagaccgattctctggctccagctcaggaaacacagcttccttgaccatcactggggctcaggcggaagatgaggctgactattactgtaactcccgggacagcagtggtaaccatgtggtattcggcggagggaccaagctgaccgtcctaggtcaacccaaggccgctcccagcgtgaccctgttccccccctcgagcgaggagctgcaggccaacaaggccaccctggtgtgtctgatcagcgacttctacccaggcgccgtgaccgtggcctggaaggccgacagcagccccgtgaaggccggcgtggagaccaccacccccagcaagcagagcaacaacaagtacgccgccagcagctacctgagcctgaccccagagcagtggaagagccacaggagctacagctgccaggtcacccacgagggcagcaccgtggaaaagaccgtggccccaaccgagtgctcctga

SEQ ID NO: 56 - protein, 214 aa, Artificial
  NHS76 Light Chain
SSELTQDPAVSVALGQTVRITCQGDSLRSYYASWYQQKPGQAPVLVIYGKNNRPSGIPDRFSGSSSGNTASLTITGAQAEDEADYYCNSRDSSGNHVVFGGGTKLTVLGQPKAAPSVTLFPPSSEELQANKATLVCLISDFYPGAVTVAWKADSSPVKAGVETTTPSKQSNNKYAASSYLSLTPEQWKSHRSYSCQVTHEGSTVEKTVAPTECS

SEQ ID NO: 57 - DNA, 1875 bp, Artificial
  heavy chain of PD-L1-GPLGMLSQ-NanoLuc (C-terminal fusion)
gaagtccaactggtcgaaagcggtggaggtctggtacagccaggaggaagtttgagactgtcatgcgctgcttccgggtttactttcagcgactcctggattcactgggttcgtcaggcacctggaaaggggcttgagtgggttgcatggatttccccatacggcggctctacatactacgctgacagcgtcaagggcaggtttacaataagcgccgatacctctaaaaacaccgcctacctgcagatgaatagtttgcgagccgaggataccgccgtgtattattgtgcccggcgccattggcccggcggcttcgattattgggggcaggggacacttgtgacagtgtctgcagcctctaccaagggccccagcgtgttccctctggccccctgcagcagaagcaccagcgagtctacagccgccctgggatgcctggtcaaggactacttccccgagcccgtgaccgtgtcctggaactctggcgccctgaccagcggcgtgcacacctttccagccgtgctgcagagcagcggcctgtacagcctgagcagcgtcgtgaccgtgcctagcagcagcctgggcaccaagacctacacctgtaacgtggaccacaagcccagcaacaccaaggtggacaagcgggtggaatctaagtacggccctccctgccccccctgcccagcccctgaatttctgggcggaccctccgtgttcctgttccccccaaagcccaaggacaccctgatgatcagccggacccccgaagtgacctgcgtggtggtggacgtgtcccaggaagatcccgaggtccagttcaactggtacgtggacggcgtggaagtgcacaacgccaagaccaagcccagagaggaacagttcaacagcacctaccgggtggtgtccgtgctgaccgtgctgcaccaggactggctgaacggcaaagagtacaagtgcaaggtctccaacaagggcctgcccagctccatcgagaaaaccatcagcaaggccaagggccagccccgcgagccccaggtgtacacactgccccccagccaggaagagatgaccaagaaccaggtgtccctgacctgcctcgtgaagggcttctaccccagcgatatcgccgtggaatgggagagcaacggccagcccgagaacaactacaagaccaccccccctgtgctggacagcgacggcagcttcttcctgtactcccggctgaccgtcgacaagagccggtggcaggaaggcaacgtcttcagctgcagcgtgatgcacgaggccctgcacaaccactacacccagaagtccctgagcctgagcctgggaggcccgctgggcatgctgagccagctcgagatggtcttcacactcgaagatttcgttggggactggcgacagacagccggctacaacctggaccaagtccttgaacagggaggtgtgtccagtttgtttcagaatctcggggtgtccgtaactccgatccaaaggattgtcctgagcggtgaaaatgggctgaagatcgacatccatgtcatcatcccgtatgaaggtctgagcggcgaccaaatgggccagatcgaaaaaatttttaaggtggtgtaccctgtggatgatcatcactttaaggtgatcctgcactatggcacactggtaatcgacggggttacgccgaacatgatcgactatttcggacggccgtatgaaggcatcgccgtgttcgacggcaaaaagatcactgtaacagggaccctgtggaacggcaacaaaattatcgacgagcgcctgatcaaccccgacggctccctgctgttccgagtaaccatcaacggagtgaccggctggcggctgtgcgaacgcattctggcg

SEQ ID NO: 58 - protein, 625 aa, Artificial
  heavy chain of PD-L1-GPLGMLSQ-NanoLuc (C-terminal fusion)
EVQLVESGGGLVQPGGSLRLSCAASGFTFSDSWIHWVRQAPGKGLEWVAWISPYGGSTYYADSVKGRFTISADTSKNTAYLQMNSLRAEDTAVYYCARRHWPGGFDYWGQGTLVTVSAASTKGPSVFPLAPCSRSTSESTAALGCLVKDYFPEPVTVSWNSGALTSGVHTFPAVLQSSGLYSLSSVVTVPSSSLGTKTYTCNVDHKPSNTKVDKRVESKYGPPCPPCPAPEFLGGPSVFLFPPKPKDTLMISRTPEVTCVVVDVSQEDPEVQFNWYVDGVEVHNAKTKPREEQFNSTYRVVSVLTVLHQDWLNGKEYKCKVSNKGLPSSIEKTISKAKGQPREPQVYTLPPSQEEMTKNQVSLTCLVKGFYPSDIAVEWESNGQPENNYKTTPPVLDSDGSFFLYSRLTVDKSRWQEGNVFSCSVMHEALHNHYTQKSLSLSLGGPLGMLSQLEMVFTLEDFVGDWRQTAGYNLDQVLEQGGVSSLFQNLGVSVTPIQRIVLSGENGLKIDIHVIIPYEGLSGDQMGQIEKIFKVVYPVDDHHFKVILHYGTLVIDGVTPNMIDYFGRPYEGIAVFDGKKITVTGTLWNGNKIIDERLINPDGSLLFRVTINGVTGWRLCERILA

SEQ ID NO: 59 - DNA, 1185 bp, Artificial
  light chain of PD-L1-GPLGMLSQ-NanoLuc (C-terminal fusion)
gacatccagatgacccaatccccatcctccttgagcgcatctgtaggagacagagtcaccatcacctgcagggcttcacaggatgttagcacagctgtggcttggtaccagcagaaacctggaaaggccccaaaactgctgatatacagcgcctcattcctgtacagcggagtgccctctcgctttagtggctctgggagtggcactgatttcacactgactatttctagtctgcagcccgaagatttcgccacttactattgccagcagtatctctatcaccccgccacctttgggcagggcacaaaggtcgagattaagcgtacggtggccgctcccagcgtgttcatcttcccacccagcgacgagcagctgaagtctggcaccgccagcgtcgtgtgcctgctgaacaacttctacccccgcgaggccaaggtgcagtggaaggtggacaacgccctgcagtccggcaacagccaggaaagcgtcaccgagcaggacagcaaggactccacctacagcctgagcagcaccctgaccctgagcaaggccgactacgagaagcacaaggtgtacgcctgcgaagtgacccaccagggcctgtccagccccgtgaccaagagcttcaaccggggcgagtgcggcccgctgggcatgctgagccagctcgagatggtcttcacactcgaagatttcgttggggactggcgacagacagccggctacaacctggaccaagtccttgaacagggaggtgtgtccagtttgtttcagaatctcggggtgtccgtaactccgatccaaaggattgtcctgagcggtgaaaatgggctgaagatcgacatccatgtcatcatcccgtatgaaggtctgagcggcgaccaaatgggccagatcgaaaaaatttttaaggtggtgtaccctgtggatgatcatcactttaaggtgatcctgcactatggcacactggtaatcgacggggttacgccgaacatgatcgactatttcggacggccgtatgaaggcatcgccgtgttcgacggcaaaaagatcactgtaacagggaccctgtggaacggcaacaaaattatcgacgagcgcctgatcaaccccgacggctccctgctgttccgagtaaccatcaacggagtgaccggctggcggctgtgcgaacgcattctggcg

SEQ ID NO: 60 - protein, 395 aa, Artificial
  light chain of PD-L1-GPLGMLSQ-NanoLuc (C-terminal fusion)
DIQMTQSPSSLSASVGDRVTITCRASQDVSTAVAWYQQKPGKAPKLLIYSASFLYSGVPSRFSGSGSGTDFTLTISSLQPEDFATYYCQQYLYHPATFGQGTKVEIKRTVAAPSVFIFPPSDEQLKSGTASVVCLLNNFYPREAKVQWKVDNALQSGNSQESVTEQDSKDSTYSLSSTLTLSKADYEKHKVYACEVTHQGLSSPVTKSFNRGECGPLGMLSQLEMVFTLEDFVGDWRQTAGYNLDQVLEQGGVSSLFQNLGVSVTPIQRIVLSGENGLKIDIHVIIPYEGLSGDQMGQIEKIFKVVYPVDDHHFKVILHYGTLVIDGVTPNMIDYFGRPYEGIAVFDGKKITVTGTLWNGNKIIDERLINPDGSLLFRVTINGVTGWRLCERILA

SEQ ID NO: 61 - DNA, 1869 bp, Artificial
  heavy chain of PD-L1-GPLGMLSQ-NanoLuc (N-terminal fusion)
atggtcttcacactcgaagatttcgttggggactggcgacagacagccggctacaacctggaccaagtccttgaacagggaggtgtgtccagtttgtttcagaatctcggggtgtccgtaactccgatccaaaggattgtcctgagcggtgaaaatgggctgaagatcgacatccatgtcatcatcccgtatgaaggtctgagcggcgaccaaatgggccagatcgaaaaaatttttaaggtggtgtaccctgtggatgatcatcactttaaggtgatcctgcactatggcacactggtaatcgacggggttacgccgaacatgatcgactatttcggacggccgtatgaaggcatcgccgtgttcgacggcaaaaagatcactgtaacagggaccctgtggaacggcaacaaaattatcgacgagcgcctgatcaaccccgacggctccctgctgttccgagtaaccatcaacggagtgaccggctggcggctgtgcgaacgcattctggcgggcccgctgggcatgctgagccaggaagtccaactggtcgaaagcggtggaggtctggtacagccaggaggaagtttgagactgtcatgcgctgcttccgggtttactttcagcgactcctggattcactgggttcgtcaggcacctggaaaggggcttgagtgggttgcatggatttccccatacggcggctctacatactacgctgacagcgtcaagggcaggtttacaataagcgccgatacctctaaaaacaccgcctacctgcagatgaatagtttgcgagccgaggataccgccgtgtattattgtgcccggcgccattggcccggcggcttcgattattgggggcaggggacacttgtgacagtgtctgcagcctctaccaagggccccagcgtgttccctctggccccctgcagcagaagcaccagcgagtctacagccgccctgggatgcctggtcaaggactacttccccgagcccgtgaccgtgtcctggaactctggcgccctgaccagcggcgtgcacacctttccagccgtgctgcagagcagcggcctgtacagcctgagcagcgtcgtgaccgtgcctagcagcagcctgggcaccaagacctacacctgtaacgtggaccacaagcccagcaacaccaaggtggacaagcgggtggaatctaagtacggccctccctgccccccctgcccagcccctgaatttctgggcggaccctccgtgttcctgttccccccaaagcccaaggacaccctgatgatcagccggacccccgaagtgacctgcgtggtggtggacgtgtcccaggaagatcccgaggtccagttcaactggtacgtggacggcgtggaagtgcacaacgccaagaccaagcccagagaggaacagttcaacagcacctaccgggtggtgtccgtgctgaccgtgctgcaccaggactggctgaacggcaaagagtacaagtgcaaggtctccaacaagggcctgcccagctccatcgagaaaaccatcagcaaggccaagggccagccccgcgagccccaggtgtacacactgccccccagccaggaagagatgaccaagaaccaggtgtccctgacctgcctcgtgaagggcttctaccccagcgatatcgccgtggaatgggagagcaacggccagcccgagaacaactacaagaccaccccccctgtgctggacagcgacggcagcttcttcctgtactcccggctgaccgtcgacaagagccggtggcaggaaggcaacgtcttcagctgcagcgtgatgcacgaggccctgcacaaccactacacccagaagtccctgagcctgagcctggga

SEQ ID NO: 62 - protein, 623 aa, Artificial
  heavy chain of PD-L1-GPLGMLSQ-NanoLuc (N-terminal fusion)
MVFTLEDFVGDWRQTAGYNLDQVLEQGGVSSLFQNLGVSVTPIQRIVLSGENGLKIDIHVIIPYEGLSGDQMGQIEKIFKVVYPVDDHHFKVILHYGTLVIDGVTPNMIDYFGRPYEGIAVFDGKKITVTGTLWNGNKIIDERLINPDGSLLFRVTINGVTGWRLCERILAGPLGMLSQEVQLVESGGGLVQPGGSLRLSCAASGFTFSDSWIHWVRQAPGKGLEWVAWISPYGGSTYYADSVKGRFTISADTSKNTAYLQMNSLRAEDTAVYYCARRHWPGGFDYWGQGTLVTVSAASTKGPSVFPLAPCSRSTSESTAALGCLVKDYFPEPVTVSWNSGALTSGVHTFPAVLQSSGLYSLSSVVTVPSSSLGTKTYTCNVDHKPSNTKVDKRVESKYGPPCPPCPAPEFLGGPSVFLFPPKPKDTLMISRTPEVTCVVVDVSQEDPEVQFNWYVDGVEVHNAKTKPREEQFNSTYRVVSVLTVLHQDWLNGKEYKCKVSNKGLPSSIEKTISKAKGQPREPQVYTLPPSQEEMTKNQVSLTCLVKGFYPSDIAVEWESNGQPENNYKTTPPVLDSDGSFFLYSRLTVDKSRWQEGNVFSCSVMHEALHNHYTQKSLSLSLG

SEQ ID NO: 63 - DNA, 1179 bp, Artificial
  light chain of PD-L1-GPLGMLSQ-NanoLuc (N-terminal fusion)
atggtcttcacactcgaagatttcgttggggactggcgacagacagccggctacaacctggaccaagtccttgaacagggaggtgtgtccagtttgtttcagaatctcggggtgtccgtaactccgatccaaaggattgtcctgagcggtgaaaatgggctgaagatcgacatccatgtcatcatcccgtatgaaggtctgagcggcgaccaaatgggccagatcgaaaaaatttttaaggtggtgtaccctgtggatgatcatcactttaaggtgatcctgcactatggcacactggtaatcgacggggttacgccgaacatgatcgactatttcggacggccgtatgaaggcatcgccgtgttcgacggcaaaaagatcactgtaacagggaccctgtggaacggcaacaaaattatcgacgagcgcctgatcaaccccgacggctccctgctgttccgagtaaccatcaacggagtgaccggctggcggctgtgcgaacgcattctggcgggcccgctgggcatgctgagccaggacatccagatgacccaatccccatcctccttgagcgcatctgtaggagacagagtcaccatcacctgcagggcttcacaggatgttagcacagctgtggcttggtaccagcagaaacctggaaaggccccaaaactgctgatatacagcgcctcattcctgtacagcggagtgccctctcgctttagtggctctgggagtggcactgatttcacactgactatttctagtctgcagcccgaagatttcgccacttactattgccagcagtatctctatcaccccgccacctttgggcagggcacaaaggtcgagattaagcgtacggtggccgctcccagcgtgttcatcttcccacccagcgacgagcagctgaagtctggcaccgccagcgtcgtgtgcctgctgaacaacttctacccccgcgaggccaaggtgcagtggaaggtggacaacgccctgcagtccggcaacagccaggaaagcgtcaccgagcaggacagcaaggactccacctacagcctgagcagcaccctgaccctgagcaaggccgactacgagaagcacaaggtgtacgcctgcgaagtgacccaccagggcctgtccagccccgtgaccaagagcttcaaccggggcgagtgc

SEQ ID NO: 64 - protein, 393 aa, Artificial
  light chain of PD-L1-GPLGMLSQ-NanoLuc (N-terminal fusion)
MVFTLEDFVGDWRQTAGYNLDQVLEQGGVSSLFQNLGVSVTPIQRIVLSGENGLKIDIHVIIPYEGLSGDQMGQIEKIFKVVYPVDDHHFKVILHYGTLVIDGVTPNMIDYFGRPYEGIAVFDGKKITVTGTLWNGNKIIDERLINPDGSLLFRVTINGVTGWRLCERILAGPLGMLSQDIQMTQSPSSLSASVGDRVTITCRASQDVSTAVAWYQQKPGKAPKLLIYSASFLYSGVPSRFSGSGSGTDFTLTISSLQPEDFATYYCQQYLYHPATFGQGTKVEIKRTVAAPSVFIFPPSDEQLKSGTASVVCLLNNFYPREAKVQWKVDNALQSGNSQESVTEQDSKDSTYSLSSTLTLSKADYEKHKVYACEVTHQGLSSPVTKSFNRGEC

SEQ ID NO: 65 - DNA, 1755 bp, Artificial
  heavy chain of PD-L1-GPLGMLSQ-IL2 (C-terminal fusion)
gaagtccaactggtcgaaagcggtggaggtctggtacagccaggaggaagtttgagactgtcatgcgctgcttccgggtttactttcagcgactcctggattcactgggttcgtcaggcacctggaaaggggcttgagtgggttgcatggatttccccatacggcggctctacatactacgctgacagcgtcaagggcaggtttacaataagcgccgatacctctaaaaacaccgcctacctgcagatgaatagtttgcgagccgaggataccgccgtgtattattgtgcccggcgccattggcccggcggcttcgattattgggggcaggggacacttgtgacagtgtctgcagcctctaccaagggccccagcgtgttccctctggccccctgcagcagaagcaccagcgagtctacagccgccctgggatgcctggtcaaggactacttccccgagcccgtgaccgtgtcctggaactctggcgccctgaccagcggcgtgcacacctttccagccgtgctgcagagcagcggcctgtacagcctgagcagcgtcgtgaccgtgcctagcagcagcctgggcaccaagacctacacctgtaacgtggaccacaagcccagcaacaccaaggtggacaagcgggtggaatctaagtacggccctccctgccccccctgcccagcccctgaatttctgggcggaccctccgtgttcctgttccccccaaagcccaaggacaccctgatgatcagccggacccccgaagtgacctgcgtggtggtggacgtgtcccaggaagatcccgaggtccagttcaactggtacgtggacggcgtggaagtgcacaacgccaagaccaagcccagagaggaacagttcaacagcacctaccgggtggtgtccgtgctgaccgtgctgcaccaggactggctgaacggcaaagagtacaagtgcaaggtctccaacaagggcctgcccagctccatcgagaaaaccatcagcaaggccaagggccagccccgcgagccccaggtgtacacactgccccccagccaggaagagatgaccaagaaccaggtgtccctgacctgcctcgtgaagggcttctaccccagcgatatcgccgtggaatgggagagcaacggccagcccgagaacaactacaagaccaccccccctgtgctggacagcgacggcagcttcttcctgtactcccggctgaccgtcgacaagagccggtggcaggaaggcaacgtcttcagctgcagcgtgatgcacgaggccctgcacaaccactacacccagaagtccctgagcctgagcctgggaggcccgctgggcatgctgagccaggcacctacctcgagttctacaaagaaaacacagctacaactggagcatttactgctggatttacagatgattttgaatggaattaataattacaagaatcccaaactcaccaggatgctcacatttaagttttacatgcccaagaaggccacagaactgaaacatcttcagtgtctagaagaagaactcaaacctctggaggaagtgctaaatttagctcaaagcaaaaactttcacttaagacccagggacttaatcagcaatatcaacgtaatagttctggaactaaagggatctgaaacaacattcatgtgtgaatatgctgatgagacagcaaccattgtagaatttctgaacagatggattaccttttgtcaaagcatcatctcaacactgact

SEQ ID NO: 66 - protein, 585 aa, Artificial
  heavy chain of PD-L1-GPLGMLSQ-IL2 (C-terminal fusion)
EVQLVESGGGLVQPGGSLRLSCAASGFTFSDSWIHWVRQAPGKGLEWVAWISPYGGSTYYADSVKGRFTISADTSKNTAYLQMNSLRAEDTAVYYCARRHWPGGFDYWGQGTLVTVSAASTKGPSVFPLAPCSRSTSESTAALGCLVKDYFPEPVTVSWNSGALTSGVHTFPAVLQSSGLYSLSSVVTVPSSSLGTKTYTCNVDHKPSNTKVDKRVESKYGPPCPPCPAPEFLGGPSVFLFPPKPKDTLMISRTPEVTCVVVDVSQEDPEVQFNWYVDGVEVHNAKTKPREEQFNSTYRVVSVLTVLHQDWLNGKEYKCKVSNKGLPSSIEKTISKAKGQPREPQVYTLPPSQEEMTKNQVSLTCLVKGFYPSDIAVEWESNGQPENNYKTTPPVLDSDGSFFLYSRLTVDKSRWQEGNVFSCSVMHEALHNHYTQKSLSLSLGGPLGMLSQAPTSSSTKKTQLQLEHLLLDLQMILNGINNYKNPKLTRMLTFKFYMPKKATELKHLQCLEEELKPLEEVLNLAQSKNFHLRPRDLISNINVIVLELKGSETTFMCEYADETATIVEFLNRWITFCQSIISTLT

SEQ ID NO: 67 - DNA, 1065 bp, Artificial
  light chain of PD-L1-GPLGMLSQ-IL2 (C-terminal fusion)
gacatccagatgacccaatccccatcctccttgagcgcatctgtaggagacagagtcaccatcacctgcagggcttcacaggatgttagcacagctgtggcttggtaccagcagaaacctggaaaggccccaaaactgctgatatacagcgcctcattcctgtacagcggagtgccctctcgctttagtggctctgggagtggcactgatttcacactgactatttctagtctgcagcccgaagatttcgccacttactattgccagcagtatctctatcaccccgccacctttgggcagggcacaaaggtcgagattaagcgtacggtggccgctcccagcgtgttcatcttcccacccagcgacgagcagctgaagtctggcaccgccagcgtcgtgtgcctgctgaacaacttctacccccgcgaggccaaggtgcagtggaaggtggacaacgccctgcagtccggcaacagccaggaaagcgtcaccgagcaggacagcaaggactccacctacagcctgagcagcaccctgaccctgagcaaggccgactacgagaagcacaaggtgtacgcctgcgaagtgacccaccagggcctgtccagccccgtgaccaagagcttcaaccggggcgagtgcggcccgctgggcatgctgagccaggcacctacctcgagttctacaaagaaaacacagctacaactggagcatttactgctggatttacagatgattttgaatggaattaataattacaagaatcccaaactcaccaggatgctcacatttaagttttacatgcccaagaaggccacagaactgaaacatcttcagtgtctagaagaagaactcaaacctctggaggaagtgctaaatttagctcaaagcaaaaactttcacttaagacccagggacttaatcagcaatatcaacgtaatagttctggaactaaagggatctgaaacaacattcatgtgtgaatatgctgatgagacagcaaccattgtagaatttctgaacagatggattaccttttgtcaaagcatcatctcaacactgact

SEQ ID NO: 68 - protein, 355 aa, Artificial
  light chain of PD-L1-GPLGMLSQ-IL2 (C-terminal fusion)
DIQMTQSPSSLSASVGDRVTITCRASQDVSTAVAWYQQKPGKAPKLLIYSASFLYSGVPSRFSGSGSGTDFTLTISSLQPEDFATYYCQQYLYHPATFGQGTKVEIKRTVAAPSVFIFPPSDEQLKSGTASVVCLLNNFYPREAKVQWKVDNALQSGNSQESVTEQDSKDSTYSLSSTLTLSKADYEKHKVYACEVTHQGLSSPVTKSFNRGECGPLGMLSQAPTSSSTKKTQLQLEHLLLDLQMILNGINNYKNPKLTRMLTFKFYMPKKATELKHLQCLEEELKPLEEVLNLAQSKNFHLRPRDLISNINVIVLELKGSETTFMCEYADETATIVEFLNRWITFCQSIISTLT

SEQ ID NO: 69 - DNA, 1755 bp, Artificial
  heavy chain of PD-L1-GPLGMLSQ-IL2 (N-terminal fusion)
gcacctacctcgagttctacaaagaaaacacagctacaactggagcatttactgctggatttacagatgattttgaatggaattaataattacaagaatcccaaactcaccaggatgctcacatttaagttttacatgcccaagaaggccacagaactgaaacatcttcagtgtctagaagaagaactcaaacctctggaggaagtgctaaatttagctcaaagcaaaaactttcacttaagacccagggacttaatcagcaatatcaacgtaatagttctggaactaaagggatctgaaacaacattcatgtgtgaatatgctgatgagacagcaaccattgtagaatttctgaacagatggattaccttttgtcaaagcatcatctcaacactgactggcccgctgggcatgctgagccaggaagtccaactggtcgaaagcggtggaggtctggtacagccaggaggaagtttgagactgtcatgcgctgcttccgggtttactttcagcgactcctggattcactgggttcgtcaggcacctggaaaggggcttgagtgggttgcatggatttccccatacggcggctctacatactacgctgacagcgtcaagggcaggtttacaataagcgccgatacctctaaaaacaccgcctacctgcagatgaatagtttgcgagccgaggataccgccgtgtattattgtgcccggcgccattggcccggcggcttcgattattgggggcaggggacacttgtgacagtgtctgcagcctctaccaagggccccagcgtgttccctctggccccctgcagcagaagcaccagcgagtctacagccgccctgggatgcctggtcaaggactacttccccgagcccgtgaccgtgtcctggaactctggcgccctgaccagcggcgtgcacacctttccagccgtgctgcagagcagcggcctgtacagcctgagcagcgtcgtgaccgtgcctagcagcagcctgggcaccaagacctacacctgtaacgtggaccacaagcccagcaacaccaaggtggacaagcgggtggaatctaagtacggccctccctgccccccctgcccagcccctgaatttctgggcggaccctccgtgttcctgttccccccaaagcccaaggacaccctgatgatcagccggacccccgaagtgacctgcgtggtggtggacgtgtcccaggaagatcccgaggtccagttcaactggtacgtggacggcgtggaagtgcacaacgccaagaccaagcccagagaggaacagttcaacagcacctaccgggtggtgtccgtgctgaccgtgctgcaccaggactggctgaacggcaaagagtacaagtgcaaggtctccaacaagggcctgcccagctccatcgagaaaaccatcagcaaggccaagggccagccccgcgagccccaggtgtacacactgccccccagccaggaagagatgaccaagaaccaggtgtccctgacctgcctcgtgaagggcttctaccccagcgatatcgccgtggaatgggagagcaacggccagcccgagaacaactacaagaccaccccccctgtgctggacagcgacggcagcttcttcctgtactcccggctgaccgtcgacaagagccggtggcaggaaggcaacgtcttcagctgcagcgtgatgcacgaggccctgcacaaccactacacccagaagtccctgagcctgagcctggga

SEQ ID NO: 70 - protein, 585 aa, Artificial
  heavy chain of PD-L1-GPLGMLSQ-IL2 (N-terminal fusion)
APTSSSTKKTQLQLEHLLLDLQMILNGINNYKNPKLTRMLTFKFYMPKKATELKHLQCLEEELKPLEEVLNLAQSKNFHLRPRDLISNINVIVLELKGSETTFMCEYADETATIVEFLNRWITFCQSIISTLTGPLGMLSQEVQLVESGGGLVQPGGSLRLSCAASGFTFSDSWIHWVRQAPGKGLEWVAWISPYGGSTYYADSVKGRFTISADTSKNTAYLQMNSLRAEDTAVYYCARRHWPGGFDYWGQGTLVTVSAASTKGPSVFPLAPCSRSTSESTAALGCLVKDYFPEPVTVSWNSGALTSGVHTFPAVLQSSGLYSLSSVVTVPSSSLGTKTYTCNVDHKPSNTKVDKRVESKYGPPCPPCPAPEFLGGPSVFLFPPKPKDTLMISRTPEVTCVVVDVSQEDPEVQFNWYVDGVEVHNAKTKPREEQFNSTYRVVSVLTVLHQDWLNGKEYKCKVSNKGLPSSIEKTISKAKGQPREPQVYTLPPSQEEMTKNQVSLTCLVKGFYPSDIAVEWESNGQPENNYKTTPPVLDSDGSFFLYSRLTVDKSRWQEGNVFSCSVMHEALHNHYTQKSLSLSLG

SEQ ID NO: 71 - DNA, 1065 bp, Artificial
  light chain of PD-L1-GPLGMLSQ-IL2 (N-terminal fusion)
gcacctacctcgagttctacaaagaaaacacagctacaactggagcatttactgctggatttacagatgattttgaatggaattaataattacaagaatcccaaactcaccaggatgctcacatttaagttttacatgcccaagaaggccacagaactgaaacatcttcagtgtctagaagaagaactcaaacctctggaggaagtgctaaatttagctcaaagcaaaaactttcacttaagacccagggacttaatcagcaatatcaacgtaatagttctggaactaaagggatctgaaacaacattcatgtgtgaatatgctgatgagacagcaaccattgtagaatttctgaacagatggattaccttttgtcaaagcatcatctcaacactgactggcccgctgggcatgctgagccaggacatccagatgacccaatccccatcctccttgagcgcatctgtaggagacagagtcaccatcacctgcagggcttcacaggatgttagcacagctgtggcttggtaccagcagaaacctggaaaggccccaaaactgctgatatacagcgcctcattcctgtacagcggagtgccctctcgctttagtggctctgggagtggcactgatttcacactgactatttctagtctgcagcccgaagatttcgccacttactattgccagcagtatctctatcaccccgccacctttgggcagggcacaaaggtcgagattaagcgtacggtggccgctcccagcgtgttcatcttcccacccagcgacgagcagctgaagtctggcaccgccagcgtcgtgtgcctgctgaacaacttctacccccgcgaggccaaggtgcagtggaaggtggacaacgccctgcagtccggcaacagccaggaaagcgtcaccgagcaggacagcaaggactccacctacagcctgagcagcaccctgaccctgagcaaggccgactacgagaagcacaaggtgtacgcctgcgaagtgacccaccagggcctgtccagccccgtgaccaagagcttcaaccggggcgagtgc

SEQ ID NO: 72 - protein, 355 aa, Artificial
  light chain of PD-L1-GPLGMLSQ-IL2 (N-terminal fusion)
APTSSSTKKTQLQLEHLLLDLQMILNGINNYKNPKLTRMLTFKFYMPKKATELKHLQCLEEELKPLEEVLNLAQSKNFHLRPRDLISNINVIVLELKGSETTFMCEYADETATIVEFLNRWITFCQSIISTLTGPLGMLSQDIQMTQSPSSLSASVGDRVTITCRASQDVSTAVAWYQQKPGKAPKLLIYSASFLYSGVPSRFSGSGSGTDFTLTISSLQPEDFATYYCQQYLYHPATFGQGTKVEIKRTVAAPSVFIFPPSDEQLKSGTASVVCLLNNFYPREAKVQWKVDNALQSGNSQESVTEQDSKDSTYSLSSTLTLSKADYEKHKVYACEVTHQGLSSPVTKSFNRGEC

SEQ ID NO: 73 - DNA, 1875 bp, Artificial
  heavy chain of PD-L1-GPLGIAGQ -Nanoluc (C-terminal fusion)
gaagtccaactggtcgaaagcggtggaggtctggtacagccaggaggaagtttgagactgtcatgcgctgcttccgggtttactttcagcgactcctggattcactgggttcgtcaggcacctggaaaggggcttgagtgggttgcatggatttccccatacggcggctctacatactacgctgacagcgtcaagggcaggtttacaataagcgccgatacctctaaaaacaccgcctacctgcagatgaatagtttgcgagccgaggataccgccgtgtattattgtgcccggcgccattggcccggcggcttcgattattgggggcaggggacacttgtgacagtgtctgcagcctctaccaagggccccagcgtgttccctctggccccctgcagcagaagcaccagcgagtctacagccgccctgggatgcctggtcaaggactacttccccgagcccgtgaccgtgtcctggaactctggcgccctgaccagcggcgtgcacacctttccagccgtgctgcagagcagcggcctgtacagcctgagcagcgtcgtgaccgtgcctagcagcagcctgggcaccaagacctacacctgtaacgtggaccacaagcccagcaacaccaaggtggacaagcgggtggaatctaagtacggccctccctgccccccctgcccagcccctgaatttctgggcggaccctccgtgttcctgttccccccaaagcccaaggacaccctgatgatcagccggacccccgaagtgacctgcgtggtggtggacgtgtcccaggaagatcccgaggtccagttcaactggtacgtggacggcgtggaagtgcacaacgccaagaccaagcccagagaggaacagttcaacagcacctaccgggtggtgtccgtgctgaccgtgctgcaccaggactggctgaacggcaaagagtacaagtgcaaggtctccaacaagggcctgcccagctccatcgagaaaaccatcagcaaggccaagggccagccccgcgagccccaggtgtacacactgccccccagccaggaagagatgaccaagaaccaggtgtccctgacctgcctcgtgaagggcttctaccccagcgatatcgccgtggaatgggagagcaacggccagcccgagaacaactacaagaccaccccccctgtgctggacagcgacggcagcttcttcctgtactcccggctgaccgtcgacaagagccggtggcaggaaggcaacgtcttcagctgcagcgtgatgcacgaggccctgcacaaccactacacccagaagtccctgagcctgagcctgggaggcccgctgggcattgcgggccagctcgagatggtcttcacactcgaagatttcgttggggactggcgacagacagccggctacaacctggaccaagtccttgaacagggaggtgtgtccagtttgtttcagaatctcggggtgtccgtaactccgatccaaaggattgtcctgagcggtgaaaatgggctgaagatcgacatccatgtcatcatcccgtatgaaggtctgagcggcgaccaaatgggccagatcgaaaaaatttttaaggtggtgtaccctgtggatgatcatcactttaaggtgatcctgcactatggcacactggtaatcgacggggttacgccgaacatgatcgactatttcggacggccgtatgaaggcatcgccgtgttcgacggcaaaaagatcactgtaacagggaccctgtggaacggcaacaaaattatcgacgagcgcctgatcaaccccgacggctccctgctgttccgagtaaccatcaacggagtgaccggctggcggctgtgcgaacgcattctggcg

SEQ ID NO: 74 - protein, 625 aa, Artificial
  heavy chain of PD-L1-GPLGIAGQ -Nanoluc (C-terminal fusion)
EVQLVESGGGLVQPGGSLRLSCAASGFTFSDSWIHWVRQAPGKGLEWVAWISPYGGSTYYADSVKGRFTISADTSKNTAYLQMNSLRAEDTAVYYCARRHWPGGFDYWGQGTLVTVSAASTKGPSVFPLAPCSRSTSESTAALGCLVKDYFPEPVTVSWNSGALTSGVHTFPAVLQSSGLYSLSSVVTVPSSSLGTKTYTCNVDHKPSNTKVDKRVESKYGPPCPPCPAPEFLGGPSVFLFPPKPKDTLMISRTPEVTCVVVDVSQEDPEVQFNWYVDGVEVHNAKTKPREEQFNSTYRVVSVLTVLHQDWLNGKEYKCKVSNKGLPSSIEKTISKAKGQPREPQVYTLPPSQEEMTKNQVSLTCLVKGFYPSDIAVEWESNGQPENNYKTTPPVLDSDGSFFLYSRLTVDKSRWQEGNVFSCSVMHEALHNHYTQKSLSLSLGGPLGIAGQLEMVFTLEDFVGDWRQTAGYNLDQVLEQGGVSSLFQNLGVSVTPIQRIVLSGENGLKIDIHVIIPYEGLSGDQMGQIEKIFKVVYPVDDHHFKVILHYGTLVIDGVTPNMIDYFGRPYEGIAVFDGKKITVTGTLWNGNKIIDERLINPDGSLLFRVTINGVTGWRLCERILA

SEQ ID NO: 75 - DNA, 1185 bp, Artificial
  light chain of PD-L1-GPLGIAGQ -Nanoluc (C-terminal fusion)
gacatccagatgacccaatccccatcctccttgagcgcatctgtaggagacagagtcaccatcacctgcagggcttcacaggatgttagcacagctgtggcttggtaccagcagaaacctggaaaggccccaaaactgctgatatacagcgcctcattcctgtacagcggagtgccctctcgctttagtggctctgggagtggcactgatttcacactgactatttctagtctgcagcccgaagatttcgccacttactattgccagcagtatctctatcaccccgccacctttgggcagggcacaaaggtcgagattaagcgtacggtggccgctcccagcgtgttcatcttcccacccagcgacgagcagctgaagtctggcaccgccagcgtcgtgtgcctgctgaacaacttctacccccgcgaggccaaggtgcagtggaaggtggacaacgccctgcagtccggcaacagccaggaaagcgtcaccgagcaggacagcaaggactccacctacagcctgagcagcaccctgaccctgagcaaggccgactacgagaagcacaaggtgtacgcctgcgaagtgacccaccagggcctgtccagccccgtgaccaagagcttcaaccggggcgagtgcggcccgctgggcattgcgggccagctcgagatggtcttcacactcgaagatttcgttggggactggcgacagacagccggctacaacctggaccaagtccttgaacagggaggtgtgtccagtttgtttcagaatctcggggtgtccgtaactccgatccaaaggattgtcctgagcggtgaaaatgggctgaagatcgacatccatgtcatcatcccgtatgaaggtctgagcggcgaccaaatgggccagatcgaaaaaatttttaaggtggtgtaccctgtggatgatcatcactttaaggtgatcctgcactatggcacactggtaatcgacggggttacgccgaacatgatcgactatttcggacggccgtatgaaggcatcgccgtgttcgacggcaaaaagatcactgtaacagggaccctgtggaacggcaacaaaattatcgacgagcgcctgatcaaccccgacggctccctgctgttccgagtaaccatcaacggagtgaccggctggcggctgtgcgaacgcattctggcg

SEQ ID NO: 76 - protein, 395 aa, Artificial
  light chain of PD-L1-GPLGIAGQ -Nanoluc (C-terminal fusion)
DIQMTQSPSSLSASVGDRVTITCRASQDVSTAVAWYQQKPGKAPKLLIYSASFLYSGVPSRFSGSGSGTDFTLTISSLQPEDFATYYCQQYLYHPATFGQGTKVEIKRTVAAPSVFIFPPSDEQLKSGTASVVCLLNNFYPREAKVQWKVDNALQSGNSQESVTEQDSKDSTYSLSSTLTLSKADYEKHKVYACEVTHQGLSSPVTKSFNRGECGPLGIAGQLEMVFTLEDFVGDWRQTAGYNLDQVLEQGGVSSLFQNLGVSVTPIQRIVLSGENGLKIDIHVIIPYEGLSGDQMGQIEKIFKVVYPVDDHHFKVILHYGTLVIDGVTPNMIDYFGRPYEGIAVFDGKKITVTGTLWNGNKIIDERLINPDGSLLFRVTINGVTGWRLCERILA

SEQ ID NO: 77 - DNA, 1869 bp, Artificial
  heavy chain of PD-L1-GPLGIAGQ -Nanoluc (N-terminal fusion)
atggtcttcacactcgaagatttcgttggggactggcgacagacagccggctacaacctggaccaagtccttgaacagggaggtgtgtccagtttgtttcagaatctcggggtgtccgtaactccgatccaaaggattgtcctgagcggtgaaaatgggctgaagatcgacatccatgtcatcatcccgtatgaaggtctgagcggcgaccaaatgggccagatcgaaaaaatttttaaggtggtgtaccctgtggatgatcatcactttaaggtgatcctgcactatggcacactggtaatcgacggggttacgccgaacatgatcgactatttcggacggccgtatgaaggcatcgccgtgttcgacggcaaaaagatcactgtaacagggaccctgtggaacggcaacaaaattatcgacgagcgcctgatcaaccccgacggctccctgctgttccgagtaaccatcaacggagtgaccggctggcggctgtgcgaacgcattctggcgggcccgctgggcattgcgggccaggaagtccaactggtcgaaagcggtggaggtctggtacagccaggaggaagtttgagactgtcatgcgctgcttccgggtttactttcagcgactcctggattcactgggttcgtcaggcacctggaaaggggcttgagtgggttgcatggatttccccatacggcggctctacatactacgctgacagcgtcaagggcaggtttacaataagcgccgatacctctaaaaacaccgcctacctgcagatgaatagtttgcgagccgaggataccgccgtgtattattgtgcccggcgccattggcccggcggcttcgattattgggggcaggggacacttgtgacagtgtctgcagcctctaccaagggccccagcgtgttccctctggccccctgcagcagaagcaccagcgagtctacagccgccctgggatgcctggtcaaggactacttccccgagcccgtgaccgtgtcctggaactctggcgccctgaccagcggcgtgcacacctttccagccgtgctgcagagcagcggcctgtacagcctgagcagcgtcgtgaccgtgcctagcagcagcctgggcaccaagacctacacctgtaacgtggaccacaagcccagcaacaccaaggtggacaagcgggtggaatctaagtacggccctccctgccccccctgcccagcccctgaatttctgggcggaccctccgtgttcctgttccccccaaagcccaaggacaccctgatgatcagccggacccccgaagtgacctgcgtggtggtggacgtgtcccaggaagatcccgaggtccagttcaactggtacgtggacggcgtggaagtgcacaacgccaagaccaagcccagagaggaacagttcaacagcacctaccgggtggtgtccgtgctgaccgtgctgcaccaggactggctgaacggcaaagagtacaagtgcaaggtctccaacaagggcctgcccagctccatcgagaaaaccatcagcaaggccaagggccagccccgcgagccccaggtgtacacactgccccccagccaggaagagatgaccaagaaccaggtgtccctgacctgcctcgtgaagggcttctaccccagcgatatcgccgtggaatgggagagcaacggccagcccgagaacaactacaagaccaccccccctgtgctggacagcgacggcagcttcttcctgtactcccggctgaccgtcgacaagagccggtggcaggaaggcaacgtcttcagctgcagcgtgatgcacgaggccctgcacaaccactacacccagaagtccctgagcctgagcctggga

SEQ ID NO: 78 - protein, 623 aa, Artificial
  heavy chain of PD-L1-GPLGIAGQ -Nanoluc (N-terminal fusion)
MVFTLEDFVGDWRQTAGYNLDQVLEQGGVSSLFQNLGVSVTPIQRIVLSGENGLKIDIHVIIPYEGLSGDQMGQIEKIFKVVYPVDDHHFKVILHYGTLVIDGVTPNMIDYFGRPYEGIAVFDGKKITVTGTLWNGNKIIDERLINPDGSLLFRVTINGVTGWRLCERILAGPLGIAGQEVQLVESGGGLVQPGGSLRLSCAASGFTFSDSWIHWVRQAPGKGLEWVAWISPYGGSTYYADSVKGRFTISADTSKNTAYLQMNSLRAEDTAVYYCARRHWPGGFDYWGQGTLVTVSAASTKGPSVFPLAPCSRSTSESTAALGCLVKDYFPEPVTVSWNSGALTSGVHTFPAVLQSSGLYSLSSVVTVPSSSLGTKTYTCNVDHKPSNTKVDKRVESKYGPPCPPCPAPEFLGGPSVFLFPPKPKDTLMISRTPEVTCVVVDVSQEDPEVQFNWYVDGVEVHNAKTKPREEQFNSTYRVVSVLTVLHQDWLNGKEYKCKVSNKGLPSSIEKTISKAKGQPREPQVYTLPPSQEEMTKNQVSLTCLVKGFYPSDIAVEWESNGQPENNYKTTPPVLDSDGSFFLYSRLTVDKSRWQEGNVFSCSVMHEALHNHYTQKSLSLSLG

SEQ ID NO: 79 - DNA, 1179 bp, Artificial
  light chain of PD-L1-GPLGIAGQ -Nanoluc (N-terminal fusion)
atggtcttcacactcgaagatttcgttggggactggcgacagacagccggctacaacctggaccaagtccttgaacagggaggtgtgtccagtttgtttcagaatctcggggtgtccgtaactccgatccaaaggattgtcctgagcggtgaaaatgggctgaagatcgacatccatgtcatcatcccgtatgaaggtctgagcggcgaccaaatgggccagatcgaaaaaatttttaaggtggtgtaccctgtggatgatcatcactttaaggtgatcctgcactatggcacactggtaatcgacggggttacgccgaacatgatcgactatttcggacggccgtatgaaggcatcgccgtgttcgacggcaaaaagatcactgtaacagggaccctgtggaacggcaacaaaattatcgacgagcgcctgatcaaccccgacggctccctgctgttccgagtaaccatcaacggagtgaccggctggcggctgtgcgaacgcattctggcgggcccgctgggcattgcgggccaggacatccagatgacccaatccccatcctccttgagcgcatctgtaggagacagagtcaccatcacctgcagggcttcacaggatgttagcacagctgtggcttggtaccagcagaaacctggaaaggccccaaaactgctgatatacagcgcctcattcctgtacagcggagtgccctctcgctttagtggctctgggagtggcactgatttcacactgactatttctagtctgcagcccgaagatttcgccacttactattgccagcagtatctctatcaccccgccacctttgggcagggcacaaaggtcgagattaagcgtacggtggccgctcccagcgtgttcatcttcccacccagcgacgagcagctgaagtctggcaccgccagcgtcgtgtgcctgctgaacaacttctacccccgcgaggccaaggtgcagtggaaggtggacaacgccctgcagtccggcaacagccaggaaagcgtcaccgagcaggacagcaaggactccacctacagcctgagcagcaccctgaccctgagcaaggccgactacgagaagcacaaggtgtacgcctgcgaagtgacccaccagggcctgtccagccccgtgaccaagagcttcaaccggggcgagtgc

SEQ ID NO: 80 - protein, 393 aa, Artificial
  light chain of PD-L1-GPLGIAGQ -Nanoluc (N-terminal fusion)
MVFTLEDFVGDWRQTAGYNLDQVLEQGGVSSLFQNLGVSVTPIQRIVLSGENGLKIDIHVIIPYEGLSGDQMGQIEKIFKVVYPVDDHHFKVILHYGTLVIDGVTPNMIDYFGRPYEGIAVFDGKKITVTGTLWNGNKIIDERLINPDGSLLFRVTINGVTGWRLCERILAGPLGIAGQDIQMTQSPSSLSASVGDRVTITCRASQDVSTAVAWYQQKPGKAPKLLIYSASFLYSGVPSRFSGSGSGTDFTLTISSLQPEDFATYYCQQYLYHPATFGQGTKVEIKRTVAAPSVFIFPPSDEQLKSGTASVVCLLNNFYPREAKVQWKVDNALQSGNSQESVTEQDSKDSTYSLSSTLTLSKADYEKHKVYACEVTHQGLSSPVTKSFNRGEC

SEQ ID NO: 81 - DNA, 1755 bp, Artificial
  heavy chain of PD-L1-GPLGIAGQ -IL2 (C-terminal fusion)
gaagtccaactggtcgaaagcggtggaggtctggtacagccaggaggaagtttgagactgtcatgcgctgcttccgggtttactttcagcgactcctggattcactgggttcgtcaggcacctggaaaggggcttgagtgggttgcatggatttccccatacggcggctctacatactacgctgacagcgtcaagggcaggtttacaataagcgccgatacctctaaaaacaccgcctacctgcagatgaatagtttgcgagccgaggataccgccgtgtattattgtgcccggcgccattggcccggcggcttcgattattgggggcaggggacacttgtgacagtgtctgcagcctctaccaagggccccagcgtgttccctctggccccctgcagcagaagcaccagcgagtctacagccgccctgggatgcctggtcaaggactacttccccgagcccgtgaccgtgtcctggaactctggcgccctgaccagcggcgtgcacacctttccagccgtgctgcagagcagcggcctgtacagcctgagcagcgtcgtgaccgtgcctagcagcagcctgggcaccaagacctacacctgtaacgtggaccacaagcccagcaacaccaaggtggacaagcgggtggaatctaagtacggccctccctgccccccctgcccagcccctgaatttctgggcggaccctccgtgttcctgttccccccaaagcccaaggacaccctgatgatcagccggacccccgaagtgacctgcgtggtggtggacgtgtcccaggaagatcccgaggtccagttcaactggtacgtggacggcgtggaagtgcacaacgccaagaccaagcccagagaggaacagttcaacagcacctaccgggtggtgtccgtgctgaccgtgctgcaccaggactggctgaacggcaaagagtacaagtgcaaggtctccaacaagggcctgcccagctccatcgagaaaaccatcagcaaggccaagggccagccccgcgagccccaggtgtacacactgccccccagccaggaagagatgaccaagaaccaggtgtccctgacctgcctcgtgaagggcttctaccccagcgatatcgccgtggaatgggagagcaacggccagcccgagaacaactacaagaccaccccccctgtgctggacagcgacggcagcttcttcctgtactcccggctgaccgtcgacaagagccggtggcaggaaggcaacgtcttcagctgcagcgtgatgcacgaggccctgcacaaccactacacccagaagtccctgagcctgagcctgggaggcccgctgggcattgcgggccaggcacctacctcgagttctacaaagaaaacacagctacaactggagcatttactgctggatttacagatgattttgaatggaattaataattacaagaatcccaaactcaccaggatgctcacatttaagttttacatgcccaagaaggccacagaactgaaacatcttcagtgtctagaagaagaactcaaacctctggaggaagtgctaaatttagctcaaagcaaaaactttcacttaagacccagggacttaatcagcaatatcaacgtaatagttctggaactaaagggatctgaaacaacattcatgtgtgaatatgctgatgagacagcaaccattgtagaatttctgaacagatggattaccttttgtcaaagcatcatctcaacactgact

SEQ ID NO: 82 - protein, 585 aa, Artificial
  heavy chain of PD-L1-GPLGIAGQ -IL2 (C-terminal fusion)
EVQLVESGGGLVQPGGSLRLSCAASGFTFSDSWIHWVRQAPGKGLEWVAWISPYGGSTYYADSVKGRFTISADTSKNTAYLQMNSLRAEDTAVYYCARRHWPGGFDYWGQGTLVTVSAASTKGPSVFPLAPCSRSTSESTAALGCLVKDYFPEPVTVSWNSGALTSGVHTFPAVLQSSGLYSLSSVVTVPSSSLGTKTYTCNVDHKPSNTKVDKRVESKYGPPCPPCPAPEFLGGPSVFLFPPKPKDTLMISRTPEVTCVVVDVSQEDPEVQFNWYVDGVEVHNAKTKPREEQFNSTYRVVSVLTVLHQDWLNGKEYKCKVSNKGLPSSIEKTISKAKGQPREPQVYTLPPSQEEMTKNQVSLTCLVKGFYPSDIAVEWESNGQPENNYKTTPPVLDSDGSFFLYSRLTVDKSRWQEGNVFSCSVMHEALHNHYTQKSLSLSLGGPLGIAGQAPTSSSTKKTQLQLEHLLLDLQMILNGINNYKNPKLTRMLTFKFYMPKKATELKHLQCLEEELKPLEEVLNLAQSKNFHLRPRDLISNINVIVLELKGSETTFMCEYADETATIVEFLNRWITFCQSIISTLT

SEQ ID NO: 83 - DNA, 1065 bp, Artificial
  light chain of PD-L1-GPLGIAGQ -IL2 (C-terminal fusion)
gacatccagatgacccaatccccatcctccttgagcgcatctgtaggagacagagtcaccatcacctgcagggcttcacaggatgttagcacagctgtggcttggtaccagcagaaacctggaaaggccccaaaactgctgatatacagcgcctcattcctgtacagcggagtgccctctcgctttagtggctctgggagtggcactgatttcacactgactatttctagtctgcagcccgaagatttcgccacttactattgccagcagtatctctatcaccccgccacctttgggcagggcacaaaggtcgagattaagcgtacggtggccgctcccagcgtgttcatcttcccacccagcgacgagcagctgaagtctggcaccgccagcgtcgtgtgcctgctgaacaacttctacccccgcgaggccaaggtgcagtggaaggtggacaacgccctgcagtccggcaacagccaggaaagcgtcaccgagcaggacagcaaggactccacctacagcctgagcagcaccctgaccctgagcaaggccgactacgagaagcacaaggtgtacgcctgcgaagtgacccaccagggcctgtccagccccgtgaccaagagcttcaaccggggcgagtgcggcccgctgggcattgcgggccaggcacctacctcgagttctacaaagaaaacacagctacaactggagcatttactgctggatttacagatgattttgaatggaattaataattacaagaatcccaaactcaccaggatgctcacatttaagttttacatgcccaagaaggccacagaactgaaacatcttcagtgtctagaagaagaactcaaacctctggaggaagtgctaaatttagctcaaagcaaaaactttcacttaagacccagggacttaatcagcaatatcaacgtaatagttctggaactaaagggatctgaaacaacattcatgtgtgaatatgctgatgagacagcaaccattgtagaatttctgaacagatggattaccttttgtcaaagcatcatctcaacactgact

SEQ ID NO: 84 - protein, 355 aa, Artificial
  light chain of PD-L1-GPLGIAGQ -IL2 (C-terminal fusion)
DIQMTQSPSSLSASVGDRVTITCRASQDVSTAVAWYQQKPGKAPKLLIYSASFLYSGVPSRFSGSGSGTDFTLTISSLQPEDFATYYCQQYLYHPATFGQGTKVEIKRTVAAPSVFIFPPSDEQLKSGTASVVCLLNNFYPREAKVQWKVDNALQSGNSQESVTEQDSKDSTYSLSSTLTLSKADYEKHKVYACEVTHQGLSSPVTKSFNRGECGPLGIAGQAPTSSSTKKTQLQLEHLLLDLQMILNGINNYKNPKLTRMLTFKFYMPKKATELKHLQCLEEELKPLEEVLNLAQSKNFHLRPRDLISNINVIVLELKGSETTFMCEYADETATIVEFLNRWITFCQSIISTLT

SEQ ID NO: 85 - DNA, 1755 bp, Artificial
  heavy chain of PD-L1-GPLGIAGQ -IL2 (N-terminal fusion)
gcacctacctcgagttctacaaagaaaacacagctacaactggagcatttactgctggatttacagatgattttgaatggaattaataattacaagaatcccaaactcaccaggatgctcacatttaagttttacatgcccaagaaggccacagaactgaaacatcttcagtgtctagaagaagaactcaaacctctggaggaagtgctaaatttagctcaaagcaaaaactttcacttaagacccagggacttaatcagcaatatcaacgtaatagttctggaactaaagggatctgaaacaacattcatgtgtgaatatgctgatgagacagcaaccattgtagaatttctgaacagatggattaccttttgtcaaagcatcatctcaacactgactggcccgctgggcattgcgggccaggaagtccaactggtcgaaagcggtggaggtctggtacagccaggaggaagtttgagactgtcatgcgctgcttccgggtttactttcagcgactcctggattcactgggttcgtcaggcacctggaaaggggcttgagtgggttgcatggatttccccatacggcggctctacatactacgctgacagcgtcaagggcaggtttacaataagcgccgatacctctaaaaacaccgcctacctgcagatgaatagtttgcgagccgaggataccgccgtgtattattgtgcccggcgccattggcccggcggcttcgattattgggggcaggggacacttgtgacagtgtctgcagcctctaccaagggccccagcgtgttccctctggccccctgcagcagaagcaccagcgagtctacagccgccctgggatgcctggtcaaggactacttccccgagcccgtgaccgtgtcctggaactctggcgccctgaccagcggcgtgcacacctttccagccgtgctgcagagcagcggcctgtacagcctgagcagcgtcgtgaccgtgcctagcagcagcctgggcaccaagacctacacctgtaacgtggaccacaagcccagcaacaccaaggtggacaagcgggtggaatctaagtacggccctccctgccccccctgcccagcccctgaatttctgggcggaccctccgtgttcctgttccccccaaagcccaaggacaccctgatgatcagccggacccccgaagtgacctgcgtggtggtggacgtgtcccaggaagatcccgaggtccagttcaactggtacgtggacggcgtggaagtgcacaacgccaagaccaagcccagagaggaacagttcaacagcacctaccgggtggtgtccgtgctgaccgtgctgcaccaggactggctgaacggcaaagagtacaagtgcaaggtctccaacaagggcctgcccagctccatcgagaaaaccatcagcaaggccaagggccagccccgcgagccccaggtgtacacactgccccccagccaggaagagatgaccaagaaccaggtgtccctgacctgcctcgtgaagggcttctaccccagcgatatcgccgtggaatgggagagcaacggccagcccgagaacaactacaagaccaccccccctgtgctggacagcgacggcagcttcttcctgtactcccggctgaccgtcgacaagagccggtggcaggaaggcaacgtcttcagctgcagcgtgatgcacgaggccctgcacaaccactacacccagaagtccctgagcctgagcctggga

SEQ ID NO: 86 - protein, 585 aa, Artificial
  heavy chain of PD-L1-GPLGIAGQ -IL2 (N-terminal fusion)
APTSSSTKKTQLQLEHLLLDLQMILNGINNYKNPKLTRMLTFKFYMPKKATELKHLQCLEEELKPLEEVLNLAQSKNFHLRPRDLISNINVIVLELKGSETTFMCEYADETATIVEFLNRWITFCQSIISTLTGPLGIAGQEVQLVESGGGLVQPGGSLRLSCAASGFTFSDSWIHWVRQAPGKGLEWVAWISPYGGSTYYADSVKGRFTISADTSKNTAYLQMNSLRAEDTAVYYCARRHWPGGFDYWGQGTLVTVSAASTKGPSVFPLAPCSRSTSESTAALGCLVKDYFPEPVTVSWNSGALTSGVHTFPAVLQSSGLYSLSSVVTVPSSSLGTKTYTCNVDHKPSNTKVDKRVESKYGPPCPPCPAPEFLGGPSVFLFPPKPKDTLMISRTPEVTCVVVDVSQEDPEVQFNWYVDGVEVHNAKTKPREEQFNSTYRVVSVLTVLHQDWLNGKEYKCKVSNKGLPSSIEKTISKAKGQPREPQVYTLPPSQEEMTKNQVSLTCLVKGFYPSDIAVEWESNGQPENNYKTTPPVLDSDGSFFLYSRLTVDKSRWQEGNVFSCSVMHEALHNHYTQKSLSLSLG

SEQ ID NO: 87 - DNA, 1065 bp, Artificial
  light chain of PD-L1-GPLGIAGQ -IL2 (N-terminal fusion)
gcacctacctcgagttctacaaagaaaacacagctacaactggagcatttactgctggatttacagatgattttgaatggaattaataattacaagaatcccaaactcaccaggatgctcacatttaagttttacatgcccaagaaggccacagaactgaaacatcttcagtgtctagaagaagaactcaaacctctggaggaagtgctaaatttagctcaaagcaaaaactttcacttaagacccagggacttaatcagcaatatcaacgtaatagttctggaactaaagggatctgaaacaacattcatgtgtgaatatgctgatgagacagcaaccattgtagaatttctgaacagatggattaccttttgtcaaagcatcatctcaacactgactggcccgctgggcattgcgggccaggacatccagatgacccaatccccatcctccttgagcgcatctgtaggagacagagtcaccatcacctgcagggcttcacaggatgttagcacagctgtggcttggtaccagcagaaacctggaaaggccccaaaactgctgatatacagcgcctcattcctgtacagcggagtgccctctcgctttagtggctctgggagtggcactgatttcacactgactatttctagtctgcagcccgaagatttcgccacttactattgccagcagtatctctatcaccccgccacctttgggcagggcacaaaggtcgagattaagcgtacggtggccgctcccagcgtgttcatcttcccacccagcgacgagcagctgaagtctggcaccgccagcgtcgtgtgcctgctgaacaacttctacccccgcgaggccaaggtgcagtggaaggtggacaacgccctgcagtccggcaacagccaggaaagcgtcaccgagcaggacagcaaggactccacctacagcctgagcagcaccctgaccctgagcaaggccgactacgagaagcacaaggtgtacgcctgcgaagtgacccaccagggcctgtccagccccgtgaccaagagcttcaaccggggcgagtgc

SEQ ID NO: 88 - protein, 355 aa, Artificial
  light chain of PD-L1-GPLGIAGQ -IL2 (N-terminal fusion)
APTSSSTKKTQLQLEHLLLDLQMILNGINNYKNPKLTRMLTFKFYMPKKATELKHLQCLEEELKPLEEVLNLAQSKNFHLRPRDLISNINVIVLELKGSETTFMCEYADETATIVEFLNRWITFCQSIISTLTGPLGIAGQDIQMTQSPSSLSASVGDRVTITCRASQDVSTAVAWYQQKPGKAPKLLIYSASFLYSGVPSRFSGSGSGTDFTLTISSLQPEDFATYYCQQYLYHPATFGQGTKVEIKRTVAAPSVFIFPPSDEQLKSGTASVVCLLNNFYPREAKVQWKVDNALQSGNSQESVTEQDSKDSTYSLSSTLTLSKADYEKHKVYACEVTHQGLSSPVTKSFNRGEC

SEQ ID NO: 89 - DNA, 1875 bp, Artificial
  heavy chain of PD-L1-GPLGLWAQ -NanoLuc (C-terminal fusion)
gaagtccaactggtcgaaagcggtggaggtctggtacagccaggaggaagtttgagactgtcatgcgctgcttccgggtttactttcagcgactcctggattcactgggttcgtcaggcacctggaaaggggcttgagtgggttgcatggatttccccatacggcggctctacatactacgctgacagcgtcaagggcaggtttacaataagcgccgatacctctaaaaacaccgcctacctgcagatgaatagtttgcgagccgaggataccgccgtgtattattgtgcccggcgccattggcccggcggcttcgattattgggggcaggggacacttgtgacagtgtctgcagcctctaccaagggccccagcgtgttccctctggccccctgcagcagaagcaccagcgagtctacagccgccctgggatgcctggtcaaggactacttccccgagcccgtgaccgtgtcctggaactctggcgccctgaccagcggcgtgcacacctttccagccgtgctgcagagcagcggcctgtacagcctgagcagcgtcgtgaccgtgcctagcagcagcctgggcaccaagacctacacctgtaacgtggaccacaagcccagcaacaccaaggtggacaagcgggtggaatctaagtacggccctccctgccccccctgcccagcccctgaatttctgggcggaccctccgtgttcctgttccccccaaagcccaaggacaccctgatgatcagccggacccccgaagtgacctgcgtggtggtggacgtgtcccaggaagatcccgaggtccagttcaactggtacgtggacggcgtggaagtgcacaacgccaagaccaagcccagagaggaacagttcaacagcacctaccgggtggtgtccgtgctgaccgtgctgcaccaggactggctgaacggcaaagagtacaagtgcaaggtctccaacaagggcctgcccagctccatcgagaaaaccatcagcaaggccaagggccagccccgcgagccccaggtgtacacactgccccccagccaggaagagatgaccaagaaccaggtgtccctgacctgcctcgtgaagggcttctaccccagcgatatcgccgtggaatgggagagcaacggccagcccgagaacaactacaagaccaccccccctgtgctggacagcgacggcagcttcttcctgtactcccggctgaccgtcgacaagagccggtggcaggaaggcaacgtcttcagctgcagcgtgatgcacgaggccctgcacaaccactacacccagaagtccctgagcctgagcctgggaggcccgctgggcctgtgggcgcagctcgagatggtcttcacactcgaagatttcgttggggactggcgacagacagccggctacaacctggaccaagtccttgaacagggaggtgtgtccagtttgtttcagaatctcggggtgtccgtaactccgatccaaaggattgtcctgagcggtgaaaatgggctgaagatcgacatccatgtcatcatcccgtatgaaggtctgagcggcgaccaaatgggccagatcgaaaaaatttttaaggtggtgtaccctgtggatgatcatcactttaaggtgatcctgcactatggcacactggtaatcgacggggttacgccgaacatgatcgactatttcggacggccgtatgaaggcatcgccgtgttcgacggcaaaaagatcactgtaacagggaccctgtggaacggcaacaaaattatcgacgagcgcctgatcaaccccgacggctccctgctgttccgagtaaccatcaacggagtgaccggctggcggctgtgcgaacgcattctggcg

SEQ ID NO: 90 - protein, 625 aa, Artificial
  heavy chain of PD-L1-GPLGLWAQ -NanoLuc (C-terminal fusion)
EVQLVESGGGLVQPGGSLRLSCAASGFTFSDSWIHWVRQAPGKGLEWVAWISPYGGSTYYADSVKGRFTISADTSKNTAYLQMNSLRAEDTAVYYCARRHWPGGFDYWGQGTLVTVSAASTKGPSVFPLAPCSRSTSESTAALGCLVKDYFPEPVTVSWNSGALTSGVHTFPAVLQSSGLYSLSSVVTVPSSSLGTKTYTCNVDHKPSNTKVDKRVESKYGPPCPPCPAPEFLGGPSVFLFPPKPKDTLMISRTPEVTCVVVDVSQEDPEVQFNWYVDGVEVHNAKTKPREEQFNSTYRVVSVLTVLHQDWLNGKEYKCKVSNKGLPSSIEKTISKAKGQPREPQVYTLPPSQEEMTKNQVSLTCLVKGFYPSDIAVEWESNGQPENNYKTTPPVLDSDGSFFLYSRLTVDKSRWQEGNVFSCSVMHEALHNHYTQKSLSLSLGGPLGLWAQLEMVFTLEDFVGDWRQTAGYNLDQVLEQGGVSSLFQNLGVSVTPIQRIVLSGENGLKIDIHVIIPYEGLSGDQMGQIEKIFKVVYPVDDHHFKVILHYGTLVIDGVTPNMIDYFGRPYEGIAVFDGKKITVTGTLWNGNKIIDERLINPDGSLLFRVTINGVTGWRLCERILA

SEQ ID NO: 91 - DNA, 1185 bp, Artificial
  light chain of PD-L1-GPLGLWAQ -NanoLuc (C-terminal fusion)
gacatccagatgacccaatccccatcctccttgagcgcatctgtaggagacagagtcaccatcacctgcagggcttcacaggatgttagcacagctgtggcttggtaccagcagaaacctggaaaggccccaaaactgctgatatacagcgcctcattcctgtacagcggagtgccctctcgctttagtggctctgggagtggcactgatttcacactgactatttctagtctgcagcccgaagatttcgccacttactattgccagcagtatctctatcaccccgccacctttgggcagggcacaaaggtcgagattaagcgtacggtggccgctcccagcgtgttcatcttcccacccagcgacgagcagctgaagtctggcaccgccagcgtcgtgtgcctgctgaacaacttctacccccgcgaggccaaggtgcagtggaaggtggacaacgccctgcagtccggcaacagccaggaaagcgtcaccgagcaggacagcaaggactccacctacagcctgagcagcaccctgaccctgagcaaggccgactacgagaagcacaaggtgtacgcctgcgaagtgacccaccagggcctgtccagccccgtgaccaagagcttcaaccggggcgagtgcggcccgctgggcctgtgggcgcagctcgagatggtcttcacactcgaagatttcgttggggactggcgacagacagccggctacaacctggaccaagtccttgaacagggaggtgtgtccagtttgtttcagaatctcggggtgtccgtaactccgatccaaaggattgtcctgagcggtgaaaatgggctgaagatcgacatccatgtcatcatcccgtatgaaggtctgagcggcgaccaaatgggccagatcgaaaaaatttttaaggtggtgtaccctgtggatgatcatcactttaaggtgatcctgcactatggcacactggtaatcgacggggttacgccgaacatgatcgactatttcggacggccgtatgaaggcatcgccgtgttcgacggcaaaaagatcactgtaacagggaccctgtggaacggcaacaaaattatcgacgagcgcctgatcaaccccgacggctccctgctgttccgagtaaccatcaacggagtgaccggctggcggctgtgcgaacgcattctggcg

SEQ ID NO: 92 - protein, 395 aa, Artificial
  light chain of PD-L1-GPLGLWAQ -NanoLuc (C-terminal fusion)
DIQMTQSPSSLSASVGDRVTITCRASQDVSTAVAWYQQKPGKAPKLLIYSASFLYSGVPSRFSGSGSGTDFTLTISSLQPEDFATYYCQQYLYHPATFGQGTKVEIKRTVAAPSVFIFPPSDEQLKSGTASVVCLLNNFYPREAKVQWKVDNALQSGNSQESVTEQDSKDSTYSLSSTLTLSKADYEKHKVYACEVTHQGLSSPVTKSFNRGECGPLGLWAQLEMVFTLEDFVGDWRQTAGYNLDQVLEQGGVSSLFQNLGVSVTPIQRIVLSGENGLKIDIHVIIPYEGLSGDQMGQIEKIFKVVYPVDDHHFKVILHYGTLVIDGVTPNMIDYFGRPYEGIAVFDGKKITVTGTLWNGNKIIDERLINPDGSLLFRVTINGVTGWRLCERILA

SEQ ID NO: 93 - DNA, 1869 bp, Artificial
  heavy chain of PD-L1-GPLGLWAQ -NanoLuc (N-terminal fusion)
atggtcttcacactcgaagatttcgttggggactggcgacagacagccggctacaacctggaccaagtccttgaacagggaggtgtgtccagtttgtttcagaatctcggggtgtccgtaactccgatccaaaggattgtcctgagcggtgaaaatgggctgaagatcgacatccatgtcatcatcccgtatgaaggtctgagcggcgaccaaatgggccagatcgaaaaaatttttaaggtggtgtaccctgtggatgatcatcactttaaggtgatcctgcactatggcacactggtaatcgacggggttacgccgaacatgatcgactatttcggacggccgtatgaaggcatcgccgtgttcgacggcaaaaagatcactgtaacagggaccctgtggaacggcaacaaaattatcgacgagcgcctgatcaaccccgacggctccctgctgttccgagtaaccatcaacggagtgaccggctggcggctgtgcgaacgcattctggcgggcccgctgggcctgtgggcgcaggaagtccaactggtcgaaagcggtggaggtctggtacagccaggaggaagtttgagactgtcatgcgctgcttccgggtttactttcagcgactcctggattcactgggttcgtcaggcacctggaaaggggcttgagtgggttgcatggatttccccatacggcggctctacatactacgctgacagcgtcaagggcaggtttacaataagcgccgatacctctaaaaacaccgcctacctgcagatgaatagtttgcgagccgaggataccgccgtgtattattgtgcccggcgccattggcccggcggcttcgattattgggggcaggggacacttgtgacagtgtctgcagcctctaccaagggccccagcgtgttccctctggccccctgcagcagaagcaccagcgagtctacagccgccctgggatgcctggtcaaggactacttccccgagcccgtgaccgtgtcctggaactctggcgccctgaccagcggcgtgcacacctttccagccgtgctgcagagcagcggcctgtacagcctgagcagcgtcgtgaccgtgcctagcagcagcctgggcaccaagacctacacctgtaacgtggaccacaagcccagcaacaccaaggtggacaagcgggtggaatctaagtacggccctccctgccccccctgcccagcccctgaatttctgggcggaccctccgtgttcctgttccccccaaagcccaaggacaccctgatgatcagccggacccccgaagtgacctgcgtggtggtggacgtgtcccaggaagatcccgaggtccagttcaactggtacgtggacggcgtggaagtgcacaacgccaagaccaagcccagagaggaacagttcaacagcacctaccgggtggtgtccgtgctgaccgtgctgcaccaggactggctgaacggcaaagagtacaagtgcaaggtctccaacaagggcctgcccagctccatcgagaaaaccatcagcaaggccaagggccagccccgcgagccccaggtgtacacactgccccccagccaggaagagatgaccaagaaccaggtgtccctgacctgcctcgtgaagggcttctaccccagcgatatcgccgtggaatgggagagcaacggccagcccgagaacaactacaagaccaccccccctgtgctggacagcgacggcagcttcttcctgtactcccggctgaccgtcgacaagagccggtggcaggaaggcaacgtcttcagctgcagcgtgatgcacgaggccctgcacaaccactacacccagaagtccctgagcctgagcctggga

SEQ ID NO: 94 - protein, 623 aa, Artificial
  heavy chain of PD-L1-GPLGLWAQ -NanoLuc (N-terminal fusion)
MVFTLEDFVGDWRQTAGYNLDQVLEQGGVSSLFQNLGVSVTPIQRIVLSGENGLKIDIHVIIPYEGLSGDQMGQIEKIFKVVYPVDDHHFKVILHYGTLVIDGVTPNMIDYFGRPYEGIAVFDGKKITVTGTLWNGNKIIDERLINPDGSLLFRVTINGVTGWRLCERILAGPLGLWAQEVQLVESGGGLVQPGGSLRLSCAASGFTFSDSWIHWVRQAPGKGLEWVAWISPYGGSTYYADSVKGRFTISADTSKNTAYLQMNSLRAEDTAVYYCARRHWPGGFDYWGQGTLVTVSAASTKGPSVFPLAPCSRSTSESTAALGCLVKDYFPEPVTVSWNSGALTSGVHTFPAVLQSSGLYSLSSVVTVPSSSLGTKTYTCNVDHKPSNTKVDKRVESKYGPPCPPCPAPEFLGGPSVFLFPPKPKDTLMISRTPEVTCVVVDVSQEDPEVQFNWYVDGVEVHNAKTKPREEQFNSTYRVVSVLTVLHQDWLNGKEYKCKVSNKGLPSSIEKTISKAKGQPREPQVYTLPPSQEEMTKNQVSLTCLVKGFYPSDIAVEWESNGQPENNYKTTPPVLDSDGSFFLYSRLTVDKSRWQEGNVFSCSVMHEALHNHYTQKSLSLSLG

SEQ ID NO: 95 - DNA, 1179 bp, Artificial
  light chain of PD-L1-GPLGLWAQ -NanoLuc (N-terminal fusion)
atggtcttcacactcgaagatttcgttggggactggcgacagacagccggctacaacctggaccaagtccttgaacagggaggtgtgtccagtttgtttcagaatctcggggtgtccgtaactccgatccaaaggattgtcctgagcggtgaaaatgggctgaagatcgacatccatgtcatcatcccgtatgaaggtctgagcggcgaccaaatgggccagatcgaaaaaatttttaaggtggtgtaccctgtggatgatcatcactttaaggtgatcctgcactatggcacactggtaatcgacggggttacgccgaacatgatcgactatttcggacggccgtatgaaggcatcgccgtgttcgacggcaaaaagatcactgtaacagggaccctgtggaacggcaacaaaattatcgacgagcgcctgatcaaccccgacggctccctgctgttccgagtaaccatcaacggagtgaccggctggcggctgtgcgaacgcattctggcgggcccgctgggcctgtgggcgcaggacatccagatgacccaatccccatcctccttgagcgcatctgtaggagacagagtcaccatcacctgcagggcttcacaggatgttagcacagctgtggcttggtaccagcagaaacctggaaaggccccaaaactgctgatatacagcgcctcattcctgtacagcggagtgccctctcgctttagtggctctgggagtggcactgatttcacactgactatttctagtctgcagcccgaagatttcgccacttactattgccagcagtatctctatcaccccgccacctttgggcagggcacaaaggtcgagattaagcgtacggtggccgctcccagcgtgttcatcttcccacccagcgacgagcagctgaagtctggcaccgccagcgtcgtgtgcctgctgaacaacttctacccccgcgaggccaaggtgcagtggaaggtggacaacgccctgcagtccggcaacagccaggaaagcgtcaccgagcaggacagcaaggactccacctacagcctgagcagcaccctgaccctgagcaaggccgactacgagaagcacaaggtgtacgcctgcgaagtgacccaccagggcctgtccagccccgtgaccaagagcttcaaccggggcgagtgc

SEQ ID NO: 96 - protein, 393 aa, Artificial
  light chain of PD-L1-GPLGLWAQ -NanoLuc (N-terminal fusion)
MVFTLEDFVGDWRQTAGYNLDQVLEQGGVSSLFQNLGVSVTPIQRIVLSGENGLKIDIHVIIPYEGLSGDQMGQIEKIFKVVYPVDDHHFKVILHYGTLVIDGVTPNMIDYFGRPYEGIAVFDGKKITVTGTLWNGNKIIDERLINPDGSLLFRVTINGVTGWRLCERILAGPLGLWAQDIQMTQSPSSLSASVGDRVTITCRASQDVSTAVAWYQQKPGKAPKLLIYSASFLYSGVPSRFSGSGSGTDFTLTISSLQPEDFATYYCQQYLYHPATFGQGTKVEIKRTVAAPSVFIFPPSDEQLKSGTASVVCLLNNFYPREAKVQWKVDNALQSGNSQESVTEQDSKDSTYSLSSTLTLSKADYEKHKVYACEVTHQGLSSPVTKSFNRGEC

SEQ ID NO: 97 - DNA, 1755 bp, Artificial
  heavy chain of PD-L1-GPLGLWAQ -IL2 (C-terminal fusion)
gaagtccaactggtcgaaagcggtggaggtctggtacagccaggaggaagtttgagactgtcatgcgctgcttccgggtttactttcagcgactcctggattcactgggttcgtcaggcacctggaaaggggcttgagtgggttgcatggatttccccatacggcggctctacatactacgctgacagcgtcaagggcaggtttacaataagcgccgatacctctaaaaacaccgcctacctgcagatgaatagtttgcgagccgaggataccgccgtgtattattgtgcccggcgccattggcccggcggcttcgattattgggggcaggggacacttgtgacagtgtctgcagcctctaccaagggccccagcgtgttccctctggccccctgcagcagaagcaccagcgagtctacagccgccctgggatgcctggtcaaggactacttccccgagcccgtgaccgtgtcctggaactctggcgccctgaccagcggcgtgcacacctttccagccgtgctgcagagcagcggcctgtacagcctgagcagcgtcgtgaccgtgcctagcagcagcctgggcaccaagacctacacctgtaacgtggaccacaagcccagcaacaccaaggtggacaagcgggtggaatctaagtacggccctccctgccccccctgcccagcccctgaatttctgggcggaccctccgtgttcctgttccccccaaagcccaaggacaccctgatgatcagccggacccccgaagtgacctgcgtggtggtggacgtgtcccaggaagatcccgaggtccagttcaactggtacgtggacggcgtggaagtgcacaacgccaagaccaagcccagagaggaacagttcaacagcacctaccgggtggtgtccgtgctgaccgtgctgcaccaggactggctgaacggcaaagagtacaagtgcaaggtctccaacaagggcctgcccagctccatcgagaaaaccatcagcaaggccaagggccagccccgcgagccccaggtgtacacactgccccccagccaggaagagatgaccaagaaccaggtgtccctgacctgcctcgtgaagggcttctaccccagcgatatcgccgtggaatgggagagcaacggccagcccgagaacaactacaagaccaccccccctgtgctggacagcgacggcagcttcttcctgtactcccggctgaccgtcgacaagagccggtggcaggaaggcaacgtcttcagctgcagcgtgatgcacgaggccctgcacaaccactacacccagaagtccctgagcctgagcctgggaggcccgctgggcctgtgggcgcaggcacctacctcgagttctacaaagaaaacacagctacaactggagcatttactgctggatttacagatgattttgaatggaattaataattacaagaatcccaaactcaccaggatgctcacatttaagttttacatgcccaagaaggccacagaactgaaacatcttcagtgtctagaagaagaactcaaacctctggaggaagtgctaaatttagctcaaagcaaaaactttcacttaagacccagggacttaatcagcaatatcaacgtaatagttctggaactaaagggatctgaaacaacattcatgtgtgaatatgctgatgagacagcaaccattgtagaatttctgaacagatggattaccttttgtcaaagcatcatctcaacactgact

SEQ ID NO: 98 - protein, 585 aa, Artificial
  heavy chain of PD-L1-GPLGLWAQ -IL2 (C-terminal fusion)
EVQLVESGGGLVQPGGSLRLSCAASGFTFSDSWIHWVRQAPGKGLEWVAWISPYGGSTYYADSVKGRFTISADTSKNTAYLQMNSLRAEDTAVYYCARRHWPGGFDYWGQGTLVTVSAASTKGPSVFPLAPCSRSTSESTAALGCLVKDYFPEPVTVSWNSGALTSGVHTFPAVLQSSGLYSLSSVVTVPSSSLGTKTYTCNVDHKPSNTKVDKRVESKYGPPCPPCPAPEFLGGPSVFLFPPKPKDTLMISRTPEVTCVVVDVSQEDPEVQFNWYVDGVEVHNAKTKPREEQFNSTYRVVSVLTVLHQDWLNGKEYKCKVSNKGLPSSIEKTISKAKGQPREPQVYTLPPSQEEMTKNQVSLTCLVKGFYPSDIAVEWESNGQPENNYKTTPPVLDSDGSFFLYSRLTVDKSRWQEGNVFSCSVMHEALHNHYTQKSLSLSLGGPLGLWAQAPTSSSTKKTQLQLEHLLLDLQMILNGINNYKNPKLTRMLTFKFYMPKKATELKHLQCLEEELKPLEEVLNLAQSKNFHLRPRDLISNINVIVLELKGSETTFMCEYADETATIVEFLNRWITFCQSIISTLT

SEQ ID NO: 99 - DNA, 1065 bp, Artificial
  light chain of PD-L1-GPLGLWAQ -IL2 (C-terminal fusion)
gacatccagatgacccaatccccatcctccttgagcgcatctgtaggagacagagtcaccatcacctgcagggcttcacaggatgttagcacagctgtggcttggtaccagcagaaacctggaaaggccccaaaactgctgatatacagcgcctcattcctgtacagcggagtgccctctcgctttagtggctctgggagtggcactgatttcacactgactatttctagtctgcagcccgaagatttcgccacttactattgccagcagtatctctatcaccccgccacctttgggcagggcacaaaggtcgagattaagcgtacggtggccgctcccagcgtgttcatcttcccacccagcgacgagcagctgaagtctggcaccgccagcgtcgtgtgcctgctgaacaacttctacccccgcgaggccaaggtgcagtggaaggtggacaacgccctgcagtccggcaacagccaggaaagcgtcaccgagcaggacagcaaggactccacctacagcctgagcagcaccctgaccctgagcaaggccgactacgagaagcacaaggtgtacgcctgcgaagtgacccaccagggcctgtccagccccgtgaccaagagcttcaaccggggcgagtgcggcccgctgggcctgtgggcgcaggcacctacctcgagttctacaaagaaaacacagctacaactggagcatttactgctggatttacagatgattttgaatggaattaataattacaagaatcccaaactcaccaggatgctcacatttaagttttacatgcccaagaaggccacagaactgaaacatcttcagtgtctagaagaagaactcaaacctctggaggaagtgctaaatttagctcaaagcaaaaactttcacttaagacccagggacttaatcagcaatatcaacgtaatagttctggaactaaagggatctgaaacaacattcatgtgtgaatatgctgatgagacagcaaccattgtagaatttctgaacagatggattaccttttgtcaaagcatcatctcaacactgact

SEQ ID NO: 100 - protein, 355 aa, Artificial
  light chain of PD-L1-GPLGLWAQ -IL2 (C-terminal fusion)
DIQMTQSPSSLSASVGDRVTITCRASQDVSTAVAWYQQKPGKAPKLLIYSASFLYSGVPSRFSGSGSGTDFTLTISSLQPEDFATYYCQQYLYHPATFGQGTKVEIKRTVAAPSVFIFPPSDEQLKSGTASVVCLLNNFYPREAKVQWKVDNALQSGNSQESVTEQDSKDSTYSLSSTLTLSKADYEKHKVYACEVTHQGLSSPVTKSFNRGECGPLGLWAQAPTSSSTKKTQLQLEHLLLDLQMILNGINNYKNPKLTRMLTFKFYMPKKATELKHLQCLEEELKPLEEVLNLAQSKNFHLRPRDLISNINVIVLELKGSETTFMCEYADETATIVEFLNRWITFCQSIISTLT

SEQ ID NO: 101 - DNA, 1755 bp, Artificial
  heavy chain of PD-L1-GPLGLWAQ -IL2 (N-terminal fusion)
gcacctacctcgagttctacaaagaaaacacagctacaactggagcatttactgctggatttacagatgattttgaatggaattaataattacaagaatcccaaactcaccaggatgctcacatttaagttttacatgcccaagaaggccacagaactgaaacatcttcagtgtctagaagaagaactcaaacctctggaggaagtgctaaatttagctcaaagcaaaaactttcacttaagacccagggacttaatcagcaatatcaacgtaatagttctggaactaaagggatctgaaacaacattcatgtgtgaatatgctgatgagacagcaaccattgtagaatttctgaacagatggattaccttttgtcaaagcatcatctcaacactgactggcccgctgggcctgtgggcgcaggaagtccaactggtcgaaagcggtggaggtctggtacagccaggaggaagtttgagactgtcatgcgctgcttccgggtttactttcagcgactcctggattcactgggttcgtcaggcacctggaaaggggcttgagtgggttgcatggatttccccatacggcggctctacatactacgctgacagcgtcaagggcaggtttacaataagcgccgatacctctaaaaacaccgcctacctgcagatgaatagtttgcgagccgaggataccgccgtgtattattgtgcccggcgccattggcccggcggcttcgattattgggggcaggggacacttgtgacagtgtctgcagcctctaccaagggccccagcgtgttccctctggccccctgcagcagaagcaccagcgagtctacagccgccctgggatgcctggtcaaggactacttccccgagcccgtgaccgtgtcctggaactctggcgccctgaccagcggcgtgcacacctttccagccgtgctgcagagcagcggcctgtacagcctgagcagcgtcgtgaccgtgcctagcagcagcctgggcaccaagacctacacctgtaacgtggaccacaagcccagcaacaccaaggtggacaagcgggtggaatctaagtacggccctccctgccccccctgcccagcccctgaatttctgggcggaccctccgtgttcctgttccccccaaagcccaaggacaccctgatgatcagccggacccccgaagtgacctgcgtggtggtggacgtgtcccaggaagatcccgaggtccagttcaactggtacgtggacggcgtggaagtgcacaacgccaagaccaagcccagagaggaacagttcaacagcacctaccgggtggtgtccgtgctgaccgtgctgcaccaggactggctgaacggcaaagagtacaagtgcaaggtctccaacaagggcctgcccagctccatcgagaaaaccatcagcaaggccaagggccagccccgcgagccccaggtgtacacactgccccccagccaggaagagatgaccaagaaccaggtgtccctgacctgcctcgtgaagggcttctaccccagcgatatcgccgtggaatgggagagcaacggccagcccgagaacaactacaagaccaccccccctgtgctggacagcgacggcagcttcttcctgtactcccggctgaccgtcgacaagagccggtggcaggaaggcaacgtcttcagctgcagcgtgatgcacgaggccctgcacaaccactacacccagaagtccctgagcctgagcctggga

SEQ ID NO: 102 - protein, 585 aa, Artificial
  heavy chain of PD-L1-GPLGLWAQ -IL2 (N-terminal fusion)
APTSSSTKKTQLQLEHLLLDLQMILNGINNYKNPKLTRMLTFKFYMPKKATELKHLQCLEEELKPLEEVLNLAQSKNFHLRPRDLISNINVIVLELKGSETTFMCEYADETATIVEFLNRWITFCQSIISTLTGPLGLWAQEVQLVESGGGLVQPGGSLRLSCAASGFTFSDSWIHWVRQAPGKGLEWVAWISPYGGSTYYADSVKGRFTISADTSKNTAYLQMNSLRAEDTAVYYCARRHWPGGFDYWGQGTLVTVSAASTKGPSVFPLAPCSRSTSESTAALGCLVKDYFPEPVTVSWNSGALTSGVHTFPAVLQSSGLYSLSSVVTVPSSSLGTKTYTCNVDHKPSNTKVDKRVESKYGPPCPPCPAPEFLGGPSVFLFPPKPKDTLMISRTPEVTCVVVDVSQEDPEVQFNWYVDGVEVHNAKTKPREEQFNSTYRVVSVLTVLHQDWLNGKEYKCKVSNKGLPSSIEKTISKAKGQPREPQVYTLPPSQEEMTKNQVSLTCLVKGFYPSDIAVEWESNGQPENNYKTTPPVLDSDGSFFLYSRLTVDKSRWQEGNVFSCSVMHEALHNHYTQKSLSLSLG

SEQ ID NO: 103 - DNA, 1065 bp, Artificial
  light chain of PD-L1-GPLGLWAQ -IL2 (N-terminal fusion)
gcacctacctcgagttctacaaagaaaacacagctacaactggagcatttactgctggatttacagatgattttgaatggaattaataattacaagaatcccaaactcaccaggatgctcacatttaagttttacatgcccaagaaggccacagaactgaaacatcttcagtgtctagaagaagaactcaaacctctggaggaagtgctaaatttagctcaaagcaaaaactttcacttaagacccagggacttaatcagcaatatcaacgtaatagttctggaactaaagggatctgaaacaacattcatgtgtgaatatgctgatgagacagcaaccattgtagaatttctgaacagatggattaccttttgtcaaagcatcatctcaacactgactggcccgctgggcctgtgggcgcaggacatccagatgacccaatccccatcctccttgagcgcatctgtaggagacagagtcaccatcacctgcagggcttcacaggatgttagcacagctgtggcttggtaccagcagaaacctggaaaggccccaaaactgctgatatacagcgcctcattcctgtacagcggagtgccctctcgctttagtggctctgggagtggcactgatttcacactgactatttctagtctgcagcccgaagatttcgccacttactattgccagcagtatctctatcaccccgccacctttgggcagggcacaaaggtcgagattaagcgtacggtggccgctcccagcgtgttcatcttcccacccagcgacgagcagctgaagtctggcaccgccagcgtcgtgtgcctgctgaacaacttctacccccgcgaggccaaggtgcagtggaaggtggacaacgccctgcagtccggcaacagccaggaaagcgtcaccgagcaggacagcaaggactccacctacagcctgagcagcaccctgaccctgagcaaggccgactacgagaagcacaaggtgtacgcctgcgaagtgacccaccagggcctgtccagccccgtgaccaagagcttcaaccggggcgagtgc

SEQ ID NO: 104 - protein, 355 aa, Artificial
  light chain of PD-L1-GPLGLWAQ -IL2 (N-terminal fusion)
APTSSSTKKTQLQLEHLLLDLQMILNGINNYKNPKLTRMLTFKFYMPKKATELKHLQCLEEELKPLEEVLNLAQSKNFHLRPRDLISNINVIVLELKGSETTFMCEYADETATIVEFLNRWITFCQSIISTLTGPLGLWAQDIQMTQSPSSLSASVGDRVTITCRASQDVSTAVAWYQQKPGKAPKLLIYSASFLYSGVPSRFSGSGSGTDFTLTISSLQPEDFATYYCQQYLYHPATFGQGTKVEIKRTVAAPSVFIFPPSDEQLKSGTASVVCLLNNFYPREAKVQWKVDNALQSGNSQESVTEQDSKDSTYSLSSTLTLSKADYEKHKVYACEVTHQGLSSPVTKSFNRGEC

SEQ ID NO: 105 - DNA, 1869 bp, Artificial
  heavy chain of PD-L1-PVGLIG -NanoLuc (C-terminal fusion)
gaagtccaactggtcgaaagcggtggaggtctggtacagccaggaggaagtttgagactgtcatgcgctgcttccgggtttactttcagcgactcctggattcactgggttcgtcaggcacctggaaaggggcttgagtgggttgcatggatttccccatacggcggctctacatactacgctgacagcgtcaagggcaggtttacaataagcgccgatacctctaaaaacaccgcctacctgcagatgaatagtttgcgagccgaggataccgccgtgtattattgtgcccggcgccattggcccggcggcttcgattattgggggcaggggacacttgtgacagtgtctgcagcctctaccaagggccccagcgtgttccctctggccccctgcagcagaagcaccagcgagtctacagccgccctgggatgcctggtcaaggactacttccccgagcccgtgaccgtgtcctggaactctggcgccctgaccagcggcgtgcacacctttccagccgtgctgcagagcagcggcctgtacagcctgagcagcgtcgtgaccgtgcctagcagcagcctgggcaccaagacctacacctgtaacgtggaccacaagcccagcaacaccaaggtggacaagcgggtggaatctaagtacggccctccctgccccccctgcccagcccctgaatttctgggcggaccctccgtgttcctgttccccccaaagcccaaggacaccctgatgatcagccggacccccgaagtgacctgcgtggtggtggacgtgtcccaggaagatcccgaggtccagttcaactggtacgtggacggcgtggaagtgcacaacgccaagaccaagcccagagaggaacagttcaacagcacctaccgggtggtgtccgtgctgaccgtgctgcaccaggactggctgaacggcaaagagtacaagtgcaaggtctccaacaagggcctgcccagctccatcgagaaaaccatcagcaaggccaagggccagccccgcgagccccaggtgtacacactgccccccagccaggaagagatgaccaagaaccaggtgtccctgacctgcctcgtgaagggcttctaccccagcgatatcgccgtggaatgggagagcaacggccagcccgagaacaactacaagaccaccccccctgtgctggacagcgacggcagcttcttcctgtactcccggctgaccgtcgacaagagccggtggcaggaaggcaacgtcttcagctgcagcgtgatgcacgaggccctgcacaaccactacacccagaagtccctgagcctgagcctgggaccggtgggcctgattggcctcgagatggtcttcacactcgaagatttcgttggggactggcgacagacagccggctacaacctggaccaagtccttgaacagggaggtgtgtccagtttgtttcagaatctcggggtgtccgtaactccgatccaaaggattgtcctgagcggtgaaaatgggctgaagatcgacatccatgtcatcatcccgtatgaaggtctgagcggcgaccaaatgggccagatcgaaaaaatttttaaggtggtgtaccctgtggatgatcatcactttaaggtgatcctgcactatggcacactggtaatcgacggggttacgccgaacatgatcgactatttcggacggccgtatgaaggcatcgccgtgttcgacggcaaaaagatcactgtaacagggaccctgtggaacggcaacaaaattatcgacgagcgcctgatcaaccccgacggctccctgctgttccgagtaaccatcaacggagtgaccggctggcggctgtgcgaacgcattctggcg

SEQ ID NO: 106 - protein, 623 aa, Artificial
  heavy chain of PD-L1-PVGLIG -NanoLuc (C-terminal fusion)
EVQLVESGGGLVQPGGSLRLSCAASGFTFSDSWIHWVRQAPGKGLEWVAWISPYGGSTYYADSVKGRFTISADTSKNTAYLQMNSLRAEDTAVYYCARRHWPGGFDYWGQGTLVTVSAASTKGPSVFPLAPCSRSTSESTAALGCLVKDYFPEPVTVSWNSGALTSGVHTFPAVLQSSGLYSLSSVVTVPSSSLGTKTYTCNVDHKPSNTKVDKRVESKYGPPCPPCPAPEFLGGPSVFLFPPKPKDTLMISRTPEVTCVVVDVSQEDPEVQFNWYVDGVEVHNAKTKPREEQFNSTYRVVSVLTVLHQDWLNGKEYKCKVSNKGLPSSIEKTISKAKGQPREPQVYTLPPSQEEMTKNQVSLTCLVKGFYPSDIAVEWESNGQPENNYKTTPPVLDSDGSFFLYSRLTVDKSRWQEGNVFSCSVMHEALHNHYTQKSLSLSLGPVGLIGLEMVFTLEDFVGDWRQTAGYNLDQVLEQGGVSSLFQNLGVSVTPIQRIVLSGENGLKIDIHVIIPYEGLSGDQMGQIEKIFKVVYPVDDHHFKVILHYGTLVIDGVTPNMIDYFGRPYEGIAVFDGKKITVTGTLWNGNKIIDERLINPDGSLLFRVTINGVTGWRLCERILA

SEQ ID NO: 107 - DNA, 1179 bp, Artificial
  light chain of PD-L1-PVGLIG -NanoLuc (C-terminal fusion)
gacatccagatgacccaatccccatcctccttgagcgcatctgtaggagacagagtcaccatcacctgcagggcttcacaggatgttagcacagctgtggcttggtaccagcagaaacctggaaaggccccaaaactgctgatatacagcgcctcattcctgtacagcggagtgccctctcgctttagtggctctgggagtggcactgatttcacactgactatttctagtctgcagcccgaagatttcgccacttactattgccagcagtatctctatcaccccgccacctttgggcagggcacaaaggtcgagattaagcgtacggtggccgctcccagcgtgttcatcttcccacccagcgacgagcagctgaagtctggcaccgccagcgtcgtgtgcctgctgaacaacttctacccccgcgaggccaaggtgcagtggaaggtggacaacgccctgcagtccggcaacagccaggaaagcgtcaccgagcaggacagcaaggactccacctacagcctgagcagcaccctgaccctgagcaaggccgactacgagaagcacaaggtgtacgcctgcgaagtgacccaccagggcctgtccagccccgtgaccaagagcttcaaccggggcgagtgcccggtgggcctgattggcctcgagatggtcttcacactcgaagatttcgttggggactggcgacagacagccggctacaacctggaccaagtccttgaacagggaggtgtgtccagtttgtttcagaatctcggggtgtccgtaactccgatccaaaggattgtcctgagcggtgaaaatgggctgaagatcgacatccatgtcatcatcccgtatgaaggtctgagcggcgaccaaatgggccagatcgaaaaaatttttaaggtggtgtaccctgtggatgatcatcactttaaggtgatcctgcactatggcacactggtaatcgacggggttacgccgaacatgatcgactatttcggacggccgtatgaaggcatcgccgtgttcgacggcaaaaagatcactgtaacagggaccctgtggaacggcaacaaaattatcgacgagcgcctgatcaaccccgacggctccctgctgttccgagtaaccatcaacggagtgaccggctggcggctgtgcgaacgcattctggcg

SEQ ID NO: 108 - protein, 393 aa, Artificial
  light chain of PD-L1-PVGLIG -NanoLuc (C-terminal fusion)
DIQMTQSPSSLSASVGDRVTITCRASQDVSTAVAWYQQKPGKAPKLLIYSASFLYSGVPSRFSGSGSGTDFTLTISSLQPEDFATYYCQQYLYHPATFGQGTKVEIKRTVAAPSVFIFPPSDEQLKSGTASVVCLLNNFYPREAKVQWKVDNALQSGNSQESVTEQDSKDSTYSLSSTLTLSKADYEKHKVYACEVTHQGLSSPVTKSFNRGECPVGLIGLEMVFTLEDFVGDWRQTAGYNLDQVLEQGGVSSLFQNLGVSVTPIQRIVLSGENGLKIDIHVIIPYEGLSGDQMGQIEKIFKVVYPVDDHHFKVILHYGTLVIDGVTPNMIDYFGRPYEGIAVFDGKKITVTGTLWNGNKIIDERLINPDGSLLFRVTINGVTGWRLCERILA

SEQ ID NO: 109 - DNA, 1863 bp, Artificial
  heavy chain of PD-L1-PVGLIG -NanoLuc (N-terminal fusion)
atggtcttcacactcgaagatttcgttggggactggcgacagacagccggctacaacctggaccaagtccttgaacagggaggtgtgtccagtttgtttcagaatctcggggtgtccgtaactccgatccaaaggattgtcctgagcggtgaaaatgggctgaagatcgacatccatgtcatcatcccgtatgaaggtctgagcggcgaccaaatgggccagatcgaaaaaatttttaaggtggtgtaccctgtggatgatcatcactttaaggtgatcctgcactatggcacactggtaatcgacggggttacgccgaacatgatcgactatttcggacggccgtatgaaggcatcgccgtgttcgacggcaaaaagatcactgtaacagggaccctgtggaacggcaacaaaattatcgacgagcgcctgatcaaccccgacggctccctgctgttccgagtaaccatcaacggagtgaccggctggcggctgtgcgaacgcattctggcgccggtgggcctgattggcgaagtccaactggtcgaaagcggtggaggtctggtacagccaggaggaagtttgagactgtcatgcgctgcttccgggtttactttcagcgactcctggattcactgggttcgtcaggcacctggaaaggggcttgagtgggttgcatggatttccccatacggcggctctacatactacgctgacagcgtcaagggcaggtttacaataagcgccgatacctctaaaaacaccgcctacctgcagatgaatagtttgcgagccgaggataccgccgtgtattattgtgcccggcgccattggcccggcggcttcgattattgggggcaggggacacttgtgacagtgtctgcagcctctaccaagggccccagcgtgttccctctggccccctgcagcagaagcaccagcgagtctacagccgccctgggatgcctggtcaaggactacttccccgagcccgtgaccgtgtcctggaactctggcgccctgaccagcggcgtgcacacctttccagccgtgctgcagagcagcggcctgtacagcctgagcagcgtcgtgaccgtgcctagcagcagcctgggcaccaagacctacacctgtaacgtggaccacaagcccagcaacaccaaggtggacaagcgggtggaatctaagtacggccctccctgccccccctgcccagcccctgaatttctgggcggaccctccgtgttcctgttccccccaaagcccaaggacaccctgatgatcagccggacccccgaagtgacctgcgtggtggtggacgtgtcccaggaagatcccgaggtccagttcaactggtacgtggacggcgtggaagtgcacaacgccaagaccaagcccagagaggaacagttcaacagcacctaccgggtggtgtccgtgctgaccgtgctgcaccaggactggctgaacggcaaagagtacaagtgcaaggtctccaacaagggcctgcccagctccatcgagaaaaccatcagcaaggccaagggccagccccgcgagccccaggtgtacacactgccccccagccaggaagagatgaccaagaaccaggtgtccctgacctgcctcgtgaagggcttctaccccagcgatatcgccgtggaatgggagagcaacggccagcccgagaacaactacaagaccaccccccctgtgctggacagcgacggcagcttcttcctgtactcccggctgaccgtcgacaagagccggtggcaggaaggcaacgtcttcagctgcagcgtgatgcacgaggccctgcacaaccactacacccagaagtccctgagcctgagcctggga

SEQ ID NO: 110 - protein, 621 aa, Artificial
  heavy chain of PD-L1-PVGLIG -NanoLuc (N-terminal fusion)
MVFTLEDFVGDWRQTAGYNLDQVLEQGGVSSLFQNLGVSVTPIQRIVLSGENGLKIDIHVIIPYEGLSGDQMGQIEKIFKVVYPVDDHHFKVILHYGTLVIDGVTPNMIDYFGRPYEGIAVFDGKKITVTGTLWNGNKIIDERLINPDGSLLFRVTINGVTGWRLCERILAPVGLIGEVQLVESGGGLVQPGGSLRLSCAASGFTFSDSWIHWVRQAPGKGLEWVAWISPYGGSTYYADSVKGRFTISADTSKNTAYLQMNSLRAEDTAVYYCARRHWPGGFDYWGQGTLVTVSAASTKGPSVFPLAPCSRSTSESTAALGCLVKDYFPEPVTVSWNSGALTSGVHTFPAVLQSSGLYSLSSVVTVPSSSLGTKTYTCNVDHKPSNTKVDKRVESKYGPPCPPCPAPEFLGGPSVFLFPPKPKDTLMISRTPEVTCVVVDVSQEDPEVQFNWYVDGVEVHNAKTKPREEQFNSTYRVVSVLTVLHQDWLNGKEYKCKVSNKGLPSSIEKTISKAKGQPREPQVYTLPPSQEEMTKNQVSLTCLVKGFYPSDIAVEWESNGQPENNYKTTPPVLDSDGSFFLYSRLTVDKSRWQEGNVFSCSVMHEALHNHYTQKSLSLSLG

SEQ ID NO: 111 - DNA, 1173 bp, Artificial
  light chain of PD-L1-PVGLIG -NanoLuc (N-terminal fusion)
atggtcttcacactcgaagatttcgttggggactggcgacagacagccggctacaacctggaccaagtccttgaacagggaggtgtgtccagtttgtttcagaatctcggggtgtccgtaactccgatccaaaggattgtcctgagcggtgaaaatgggctgaagatcgacatccatgtcatcatcccgtatgaaggtctgagcggcgaccaaatgggccagatcgaaaaaatttttaaggtggtgtaccctgtggatgatcatcactttaaggtgatcctgcactatggcacactggtaatcgacggggttacgccgaacatgatcgactatttcggacggccgtatgaaggcatcgccgtgttcgacggcaaaaagatcactgtaacagggaccctgtggaacggcaacaaaattatcgacgagcgcctgatcaaccccgacggctccctgctgttccgagtaaccatcaacggagtgaccggctggcggctgtgcgaacgcattctggcgccggtgggcctgattggcgacatccagatgacccaatccccatcctccttgagcgcatctgtaggagacagagtcaccatcacctgcagggcttcacaggatgttagcacagctgtggcttggtaccagcagaaacctggaaaggccccaaaactgctgatatacagcgcctcattcctgtacagcggagtgccctctcgctttagtggctctgggagtggcactgatttcacactgactatttctagtctgcagcccgaagatttcgccacttactattgccagcagtatctctatcaccccgccacctttgggcagggcacaaaggtcgagattaagcgtacggtggccgctcccagcgtgttcatcttcccacccagcgacgagcagctgaagtctggcaccgccagcgtcgtgtgcctgctgaacaacttctacccccgcgaggccaaggtgcagtggaaggtggacaacgccctgcagtccggcaacagccaggaaagcgtcaccgagcaggacagcaaggactccacctacagcctgagcagcaccctgaccctgagcaaggccgactacgagaagcacaaggtgtacgcctgcgaagtgacccaccagggcctgtccagccccgtgaccaagagcttcaaccggggcgagtgc

SEQ ID NO: 112 - protein, 391 aa, Artificial
  light chain of PD-L1-PVGLIG -NanoLuc (N-terminal fusion)
MVFTLEDFVGDWRQTAGYNLDQVLEQGGVSSLFQNLGVSVTPIQRIVLSGENGLKIDIHVIIPYEGLSGDQMGQIEKIFKVVYPVDDHHFKVILHYGTLVIDGVTPNMIDYFGRPYEGIAVFDGKKITVTGTLWNGNKIIDERLINPDGSLLFRVTINGVTGWRLCERILAPVGLIGDIQMTQSPSSLSASVGDRVTITCRASQDVSTAVAWYQQKPGKAPKLLIYSASFLYSGVPSRFSGSGSGTDFTLTISSLQPEDFATYYCQQYLYHPATFGQGTKVEIKRTVAAPSVFIFPPSDEQLKSGTASVVCLLNNFYPREAKVQWKVDNALQSGNSQESVTEQDSKDSTYSLSSTLTLSKADYEKHKVYACEVTHQGLSSPVTKSFNRGEC

SEQ ID NO: 113 - DNA, 1749 bp, Artificial
  heavy chain of PD-L1-PVGLIG-IL2 (C-terminal fusion)
gaagtccaactggtcgaaagcggtggaggtctggtacagccaggaggaagtttgagactgtcatgcgctgcttccgggtttactttcagcgactcctggattcactgggttcgtcaggcacctggaaaggggcttgagtgggttgcatggatttccccatacggcggctctacatactacgctgacagcgtcaagggcaggtttacaataagcgccgatacctctaaaaacaccgcctacctgcagatgaatagtttgcgagccgaggataccgccgtgtattattgtgcccggcgccattggcccggcggcttcgattattgggggcaggggacacttgtgacagtgtctgcagcctctaccaagggccccagcgtgttccctctggccccctgcagcagaagcaccagcgagtctacagccgccctgggatgcctggtcaaggactacttccccgagcccgtgaccgtgtcctggaactctggcgccctgaccagcggcgtgcacacctttccagccgtgctgcagagcagcggcctgtacagcctgagcagcgtcgtgaccgtgcctagcagcagcctgggcaccaagacctacacctgtaacgtggaccacaagcccagcaacaccaaggtggacaagcgggtggaatctaagtacggccctccctgccccccctgcccagcccctgaatttctgggcggaccctccgtgttcctgttccccccaaagcccaaggacaccctgatgatcagccggacccccgaagtgacctgcgtggtggtggacgtgtcccaggaagatcccgaggtccagttcaactggtacgtggacggcgtggaagtgcacaacgccaagaccaagcccagagaggaacagttcaacagcacctaccgggtggtgtccgtgctgaccgtgctgcaccaggactggctgaacggcaaagagtacaagtgcaaggtctccaacaagggcctgcccagctccatcgagaaaaccatcagcaaggccaagggccagccccgcgagccccaggtgtacacactgccccccagccaggaagagatgaccaagaaccaggtgtccctgacctgcctcgtgaagggcttctaccccagcgatatcgccgtggaatgggagagcaacggccagcccgagaacaactacaagaccaccccccctgtgctggacagcgacggcagcttcttcctgtactcccggctgaccgtcgacaagagccggtggcaggaaggcaacgtcttcagctgcagcgtgatgcacgaggccctgcacaaccactacacccagaagtccctgagcctgagcctgggaccggtgggcctgattggcgcacctacctcgagttctacaaagaaaacacagctacaactggagcatttactgctggatttacagatgattttgaatggaattaataattacaagaatcccaaactcaccaggatgctcacatttaagttttacatgcccaagaaggccacagaactgaaacatcttcagtgtctagaagaagaactcaaacctctggaggaagtgctaaatttagctcaaagcaaaaactttcacttaagacccagggacttaatcagcaatatcaacgtaatagttctggaactaaagggatctgaaacaacattcatgtgtgaatatgctgatgagacagcaaccattgtagaatttctgaacagatggattaccttttgtcaaagcatcatctcaacactgact

SEQ ID NO: 114 - protein, 583 aa, Artificial
  heavy chain of PD-L1-PVGLIG-IL2 (C-terminal fusion)
EVQLVESGGGLVQPGGSLRLSCAASGFTFSDSWIHWVRQAPGKGLEWVAWISPYGGSTYYADSVKGRFTISADTSKNTAYLQMNSLRAEDTAVYYCARRHWPGGFDYWGQGTLVTVSAASTKGPSVFPLAPCSRSTSESTAALGCLVKDYFPEPVTVSWNSGALTSGVHTFPAVLQSSGLYSLSSVVTVPSSSLGTKTYTCNVDHKPSNTKVDKRVESKYGPPCPPCPAPEFLGGPSVFLFPPKPKDTLMISRTPEVTCVVVDVSQEDPEVQFNWYVDGVEVHNAKTKPREEQFNSTYRVVSVLTVLHQDWLNGKEYKCKVSNKGLPSSIEKTISKAKGQPREPQVYTLPPSQEEMTKNQVSLTCLVKGFYPSDIAVEWESNGQPENNYKTTPPVLDSDGSFFLYSRLTVDKSRWQEGNVFSCSVMHEALHNHYTQKSLSLSLGPVGLIGAPTSSSTKKTQLQLEHLLLDLQMILNGINNYKNPKLTRMLTFKFYMPKKATELKHLQCLEEELKPLEEVLNLAQSKNFHLRPRDLISNINVIVLELKGSETTFMCEYADETATIVEFLNRWITFCQSIISTLT

SEQ ID NO: 115 - DNA, 1059 bp, Artificial
  light chain of PD-L1-PVGLIG-IL2 (C-terminal fusion)
gacatccagatgacccaatccccatcctccttgagcgcatctgtaggagacagagtcaccatcacctgcagggcttcacaggatgttagcacagctgtggcttggtaccagcagaaacctggaaaggccccaaaactgctgatatacagcgcctcattcctgtacagcggagtgccctctcgctttagtggctctgggagtggcactgatttcacactgactatttctagtctgcagcccgaagatttcgccacttactattgccagcagtatctctatcaccccgccacctttgggcagggcacaaaggtcgagattaagcgtacggtggccgctcccagcgtgttcatcttcccacccagcgacgagcagctgaagtctggcaccgccagcgtcgtgtgcctgctgaacaacttctacccccgcgaggccaaggtgcagtggaaggtggacaacgccctgcagtccggcaacagccaggaaagcgtcaccgagcaggacagcaaggactccacctacagcctgagcagcaccctgaccctgagcaaggccgactacgagaagcacaaggtgtacgcctgcgaagtgacccaccagggcctgtccagccccgtgaccaagagcttcaaccggggcgagtgcccggtgggcctgattggcgcacctacctcgagttctacaaagaaaacacagctacaactggagcatttactgctggatttacagatgattttgaatggaattaataattacaagaatcccaaactcaccaggatgctcacatttaagttttacatgcccaagaaggccacagaactgaaacatcttcagtgtctagaagaagaactcaaacctctggaggaagtgctaaatttagctcaaagcaaaaactttcacttaagacccagggacttaatcagcaatatcaacgtaatagttctggaactaaagggatctgaaacaacattcatgtgtgaatatgctgatgagacagcaaccattgtagaatttctgaacagatggattaccttttgtcaaagcatcatctcaacactgact

SEQ ID NO: 116 - protein, 353 aa, Artificial
  light chain of PD-L1-PVGLIG-IL2 (C-terminal fusion)
DIQMTQSPSSLSASVGDRVTITCRASQDVSTAVAWYQQKPGKAPKLLIYSASFLYSGVPSRFSGSGSGTDFTLTISSLQPEDFATYYCQQYLYHPATFGQGTKVEIKRTVAAPSVFIFPPSDEQLKSGTASVVCLLNNFYPREAKVQWKVDNALQSGNSQESVTEQDSKDSTYSLSSTLTLSKADYEKHKVYACEVTHQGLSSPVTKSFNRGECPVGLIGAPTSSSTKKTQLQLEHLLLDLQMILNGINNYKNPKLTRMLTFKFYMPKKATELKHLQCLEEELKPLEEVLNLAQSKNFHLRPRDLISNINVIVLELKGSETTFMCEYADETATIVEFLNRWITFCQSIISTLT

SEQ ID NO: 117 - DNA, 1749 bp, Artificial
  heavy chain of PD-L1-PVGLIG-IL2 (N-terminal fusion)
gcacctacctcgagttctacaaagaaaacacagctacaactggagcatttactgctggatttacagatgattttgaatggaattaataattacaagaatcccaaactcaccaggatgctcacatttaagttttacatgcccaagaaggccacagaactgaaacatcttcagtgtctagaagaagaactcaaacctctggaggaagtgctaaatttagctcaaagcaaaaactttcacttaagacccagggacttaatcagcaatatcaacgtaatagttctggaactaaagggatctgaaacaacattcatgtgtgaatatgctgatgagacagcaaccattgtagaatttctgaacagatggattaccttttgtcaaagcatcatctcaacactgactccggtgggcctgattggcgaagtccaactggtcgaaagcggtggaggtctggtacagccaggaggaagtttgagactgtcatgcgctgcttccgggtttactttcagcgactcctggattcactgggttcgtcaggcacctggaaaggggcttgagtgggttgcatggatttccccatacggcggctctacatactacgctgacagcgtcaagggcaggtttacaataagcgccgatacctctaaaaacaccgcctacctgcagatgaatagtttgcgagccgaggataccgccgtgtattattgtgcccggcgccattggcccggcggcttcgattattgggggcaggggacacttgtgacagtgtctgcagcctctaccaagggccccagcgtgttccctctggccccctgcagcagaagcaccagcgagtctacagccgccctgggatgcctggtcaaggactacttccccgagcccgtgaccgtgtcctggaactctggcgccctgaccagcggcgtgcacacctttccagccgtgctgcagagcagcggcctgtacagcctgagcagcgtcgtgaccgtgcctagcagcagcctgggcaccaagacctacacctgtaacgtggaccacaagcccagcaacaccaaggtggacaagcgggtggaatctaagtacggccctccctgccccccctgcccagcccctgaatttctgggcggaccctccgtgttcctgttccccccaaagcccaaggacaccctgatgatcagccggacccccgaagtgacctgcgtggtggtggacgtgtcccaggaagatcccgaggtccagttcaactggtacgtggacggcgtggaagtgcacaacgccaagaccaagcccagagaggaacagttcaacagcacctaccgggtggtgtccgtgctgaccgtgctgcaccaggactggctgaacggcaaagagtacaagtgcaaggtctccaacaagggcctgcccagctccatcgagaaaaccatcagcaaggccaagggccagccccgcgagccccaggtgtacacactgccccccagccaggaagagatgaccaagaaccaggtgtccctgacctgcctcgtgaagggcttctaccccagcgatatcgccgtggaatgggagagcaacggccagcccgagaacaactacaagaccaccccccctgtgctggacagcgacggcagcttcttcctgtactcccggctgaccgtcgacaagagccggtggcaggaaggcaacgtcttcagctgcagcgtgatgcacgaggccctgcacaaccactacacccagaagtccctgagcctgagcctggga

SEQ ID NO: 118 - protein, 583 aa, Artificial
  heavy chain of PD-L1-PVGLIG-IL2 (N-terminal fusion)
APTSSSTKKTQLQLEHLLLDLQMILNGINNYKNPKLTRMLTFKFYMPKKATELKHLQCLEEELKPLEEVLNLAQSKNFHLRPRDLISNINVIVLELKGSETTFMCEYADETATIVEFLNRWITFCQSIISTLTPVGLIGEVQLVESGGGLVQPGGSLRLSCAASGFTFSDSWIHWVRQAPGKGLEWVAWISPYGGSTYYADSVKGRFTISADTSKNTAYLQMNSLRAEDTAVYYCARRHWPGGFDYWGQGTLVTVSAASTKGPSVFPLAPCSRSTSESTAALGCLVKDYFPEPVTVSWNSGALTSGVHTFPAVLQSSGLYSLSSVVTVPSSSLGTKTYTCNVDHKPSNTKVDKRVESKYGPPCPPCPAPEFLGGPSVFLFPPKPKDTLMISRTPEVTCVVVDVSQEDPEVQFNWYVDGVEVHNAKTKPREEQFNSTYRVVSVLTVLHQDWLNGKEYKCKVSNKGLPSSIEKTISKAKGQPREPQVYTLPPSQEEMTKNQVSLTCLVKGFYPSDIAVEWESNGQPENNYKTTPPVLDSDGSFFLYSRLTVDKSRWQEGNVFSCSVMHEALHNHYTQKSLSLSLG

SEQ ID NO: 119 - DNA, 1059 bp, Artificial
  light chain of PD-L1-PVGLIG-IL2 (N-terminal fusion)
gcacctacctcgagttctacaaagaaaacacagctacaactggagcatttactgctggatttacagatgattttgaatggaattaataattacaagaatcccaaactcaccaggatgctcacatttaagttttacatgcccaagaaggccacagaactgaaacatcttcagtgtctagaagaagaactcaaacctctggaggaagtgctaaatttagctcaaagcaaaaactttcacttaagacccagggacttaatcagcaatatcaacgtaatagttctggaactaaagggatctgaaacaacattcatgtgtgaatatgctgatgagacagcaaccattgtagaatttctgaacagatggattaccttttgtcaaagcatcatctcaacactgactccggtgggcctgattggcgacatccagatgacccaatccccatcctccttgagcgcatctgtaggagacagagtcaccatcacctgcagggcttcacaggatgttagcacagctgtggcttggtaccagcagaaacctggaaaggccccaaaactgctgatatacagcgcctcattcctgtacagcggagtgccctctcgctttagtggctctgggagtggcactgatttcacactgactatttctagtctgcagcccgaagatttcgccacttactattgccagcagtatctctatcaccccgccacctttgggcagggcacaaaggtcgagattaagcgtacggtggccgctcccagcgtgttcatcttcccacccagcgacgagcagctgaagtctggcaccgccagcgtcgtgtgcctgctgaacaacttctacccccgcgaggccaaggtgcagtggaaggtggacaacgccctgcagtccggcaacagccaggaaagcgtcaccgagcaggacagcaaggactccacctacagcctgagcagcaccctgaccctgagcaaggccgactacgagaagcacaaggtgtacgcctgcgaagtgacccaccagggcctgtccagccccgtgaccaagagcttcaaccggggcgagtgc

SEQ ID NO: 120 - protein, 353 aa, Artificial
  light chain of PD-L1-PVGLIG-IL2 (N-terminal fusion)
APTSSSTKKTQLQLEHLLLDLQMILNGINNYKNPKLTRMLTFKFYMPKKATELKHLQCLEEELKPLEEVLNLAQSKNFHLRPRDLISNINVIVLELKGSETTFMCEYADETATIVEFLNRWITFCQSIISTLTPVGLIGDIQMTQSPSSLSASVGDRVTITCRASQDVSTAVAWYQQKPGKAPKLLIYSASFLYSGVPSRFSGSGSGTDFTLTISSLQPEDFATYYCQQYLYHPATFGQGTKVEIKRTVAAPSVFIFPPSDEQLKSGTASVVCLLNNFYPREAKVQWKVDNALQSGNSQESVTEQDSKDSTYSLSSTLTLSKADYEKHKVYACEVTHQGLSSPVTKSFNRGEC

SEQ ID NO: 121 - DNA, 1869 bp, Artificial
  heavy chain of PD-L1-PLGLAG-NanoLuc (C-terminal fusion)
gaagtccaactggtcgaaagcggtggaggtctggtacagccaggaggaagtttgagactgtcatgcgctgcttccgggtttactttcagcgactcctggattcactgggttcgtcaggcacctggaaaggggcttgagtgggttgcatggatttccccatacggcggctctacatactacgctgacagcgtcaagggcaggtttacaataagcgccgatacctctaaaaacaccgcctacctgcagatgaatagtttgcgagccgaggataccgccgtgtattattgtgcccggcgccattggcccggcggcttcgattattgggggcaggggacacttgtgacagtgtctgcagcctctaccaagggccccagcgtgttccctctggccccctgcagcagaagcaccagcgagtctacagccgccctgggatgcctggtcaaggactacttccccgagcccgtgaccgtgtcctggaactctggcgccctgaccagcggcgtgcacacctttccagccgtgctgcagagcagcggcctgtacagcctgagcagcgtcgtgaccgtgcctagcagcagcctgggcaccaagacctacacctgtaacgtggaccacaagcccagcaacaccaaggtggacaagcgggtggaatctaagtacggccctccctgccccccctgcccagcccctgaatttctgggcggaccctccgtgttcctgttccccccaaagcccaaggacaccctgatgatcagccggacccccgaagtgacctgcgtggtggtggacgtgtcccaggaagatcccgaggtccagttcaactggtacgtggacggcgtggaagtgcacaacgccaagaccaagcccagagaggaacagttcaacagcacctaccgggtggtgtccgtgctgaccgtgctgcaccaggactggctgaacggcaaagagtacaagtgcaaggtctccaacaagggcctgcccagctccatcgagaaaaccatcagcaaggccaagggccagccccgcgagccccaggtgtacacactgccccccagccaggaagagatgaccaagaaccaggtgtccctgacctgcctcgtgaagggcttctaccccagcgatatcgccgtggaatgggagagcaacggccagcccgagaacaactacaagaccaccccccctgtgctggacagcgacggcagcttcttcctgtactcccggctgaccgtcgacaagagccggtggcaggaaggcaacgtcttcagctgcagcgtgatgcacgaggccctgcacaaccactacacccagaagtccctgagcctgagcctgggaccgctgggcctggcgggcctcgagatggtcttcacactcgaagatttcgttggggactggcgacagacagccggctacaacctggaccaagtccttgaacagggaggtgtgtccagtttgtttcagaatctcggggtgtccgtaactccgatccaaaggattgtcctgagcggtgaaaatgggctgaagatcgacatccatgtcatcatcccgtatgaaggtctgagcggcgaccaaatgggccagatcgaaaaaatttttaaggtggtgtaccctgtggatgatcatcactttaaggtgatcctgcactatggcacactggtaatcgacggggttacgccgaacatgatcgactatttcggacggccgtatgaaggcatcgccgtgttcgacggcaaaaagatcactgtaacagggaccctgtggaacggcaacaaaattatcgacgagcgcctgatcaaccccgacggctccctgctgttccgagtaaccatcaacggagtgaccggctggcggctgtgcgaacgcattctggcg

SEQ ID NO: 122 - protein, 623 aa, Artificial
  heavy chain of PD-L1-PLGLAG-NanoLuc (C-terminal fusion)
EVQLVESGGGLVQPGGSLRLSCAASGFTFSDSWIHWVRQAPGKGLEWVAWISPYGGSTYYADSVKGRFTISADTSKNTAYLQMNSLRAEDTAVYYCARRHWPGGFDYWGQGTLVTVSAASTKGPSVFPLAPCSRSTSESTAALGCLVKDYFPEPVTVSWNSGALTSGVHTFPAVLQSSGLYSLSSVVTVPSSSLGTKTYTCNVDHKPSNTKVDKRVESKYGPPCPPCPAPEFLGGPSVFLFPPKPKDTLMISRTPEVTCVVVDVSQEDPEVQFNWYVDGVEVHNAKTKPREEQFNSTYRVVSVLTVLHQDWLNGKEYKCKVSNKGLPSSIEKTISKAKGQPREPQVYTLPPSQEEMTKNQVSLTCLVKGFYPSDIAVEWESNGQPENNYKTTPPVLDSDGSFFLYSRLTVDKSRWQEGNVFSCSVMHEALHNHYTQKSLSLSLGPLGLAGLEMVFTLEDFVGDWRQTAGYNLDQVLEQGGVSSLFQNLGVSVTPIQRIVLSGENGLKIDIHVIIPYEGLSGDQMGQIEKIFKVVYPVDDHHFKVILHYGTLVIDGVTPNMIDYFGRPYEGIAVFDGKKITVTGTLWNGNKIIDERLINPDGSLLFRVTINGVTGWRLCERILA

SEQ ID NO: 123 - DNA, 1179 bp, Artificial
  light chain of PD-L1-PLGLAG-NanoLuc (C-terminal fusion)
gacatccagatgacccaatccccatcctccttgagcgcatctgtaggagacagagtcaccatcacctgcagggcttcacaggatgttagcacagctgtggcttggtaccagcagaaacctggaaaggccccaaaactgctgatatacagcgcctcattcctgtacagcggagtgccctctcgctttagtggctctgggagtggcactgatttcacactgactatttctagtctgcagcccgaagatttcgccacttactattgccagcagtatctctatcaccccgccacctttgggcagggcacaaaggtcgagattaagcgtacggtggccgctcccagcgtgttcatcttcccacccagcgacgagcagctgaagtctggcaccgccagcgtcgtgtgcctgctgaacaacttctacccccgcgaggccaaggtgcagtggaaggtggacaacgccctgcagtccggcaacagccaggaaagcgtcaccgagcaggacagcaaggactccacctacagcctgagcagcaccctgaccctgagcaaggccgactacgagaagcacaaggtgtacgcctgcgaagtgacccaccagggcctgtccagccccgtgaccaagagcttcaaccggggcgagtgcccgctgggcctggcgggcctcgagatggtcttcacactcgaagatttcgttggggactggcgacagacagccggctacaacctggaccaagtccttgaacagggaggtgtgtccagtttgtttcagaatctcggggtgtccgtaactccgatccaaaggattgtcctgagcggtgaaaatgggctgaagatcgacatccatgtcatcatcccgtatgaaggtctgagcggcgaccaaatgggccagatcgaaaaaatttttaaggtggtgtaccctgtggatgatcatcactttaaggtgatcctgcactatggcacactggtaatcgacggggttacgccgaacatgatcgactatttcggacggccgtatgaaggcatcgccgtgttcgacggcaaaaagatcactgtaacagggaccctgtggaacggcaacaaaattatcgacgagcgcctgatcaaccccgacggctccctgctgttccgagtaaccatcaacggagtgaccggctggcggctgtgcgaacgcattctggcg

SEQ ID NO: 124 - protein, 393 aa, Artificial
  light chain of PD-L1-PLGLAG-NanoLuc (C-terminal fusion)
DIQMTQSPSSLSASVGDRVTITCRASQDVSTAVAWYQQKPGKAPKLLIYSASFLYSGVPSRFSGSGSGTDFTLTISSLQPEDFATYYCQQYLYHPATFGQGTKVEIKRTVAAPSVFIFPPSDEQLKSGTASVVCLLNNFYPREAKVQWKVDNALQSGNSQESVTEQDSKDSTYSLSSTLTLSKADYEKHKVYACEVTHQGLSSPVTKSFNRGECPLGLAGLEMVFTLEDFVGDWRQTAGYNLDQVLEQGGVSSLFQNLGVSVTPIQRIVLSGENGLKIDIHVIIPYEGLSGDQMGQIEKIFKVVYPVDDHHFKVILHYGTLVIDGVTPNMIDYFGRPYEGIAVFDGKKITVTGTLWNGNKIIDERLINPDGSLLFRVTINGVTGWRLCERILA

SEQ ID NO: 125 - DNA, 1863 bp, Artificial
  heavy chain of PD-L1-PLGLAG-NanoLuc (N-terminal fusion)
atggtcttcacactcgaagatttcgttggggactggcgacagacagccggctacaacctggaccaagtccttgaacagggaggtgtgtccagtttgtttcagaatctcggggtgtccgtaactccgatccaaaggattgtcctgagcggtgaaaatgggctgaagatcgacatccatgtcatcatcccgtatgaaggtctgagcggcgaccaaatgggccagatcgaaaaaatttttaaggtggtgtaccctgtggatgatcatcactttaaggtgatcctgcactatggcacactggtaatcgacggggttacgccgaacatgatcgactatttcggacggccgtatgaaggcatcgccgtgttcgacggcaaaaagatcactgtaacagggaccctgtggaacggcaacaaaattatcgacgagcgcctgatcaaccccgacggctccctgctgttccgagtaaccatcaacggagtgaccggctggcggctgtgcgaacgcattctggcgccgctgggcctggcgggcgaagtccaactggtcgaaagcggtggaggtctggtacagccaggaggaagtttgagactgtcatgcgctgcttccgggtttactttcagcgactcctggattcactgggttcgtcaggcacctggaaaggggcttgagtgggttgcatggatttccccatacggcggctctacatactacgctgacagcgtcaagggcaggtttacaataagcgccgatacctctaaaaacaccgcctacctgcagatgaatagtttgcgagccgaggataccgccgtgtattattgtgcccggcgccattggcccggcggcttcgattattgggggcaggggacacttgtgacagtgtctgcagcctctaccaagggccccagcgtgttccctctggccccctgcagcagaagcaccagcgagtctacagccgccctgggatgcctggtcaaggactacttccccgagcccgtgaccgtgtcctggaactctggcgccctgaccagcggcgtgcacacctttccagccgtgctgcagagcagcggcctgtacagcctgagcagcgtcgtgaccgtgcctagcagcagcctgggcaccaagacctacacctgtaacgtggaccacaagcccagcaacaccaaggtggacaagcgggtggaatctaagtacggccctccctgccccccctgcccagcccctgaatttctgggcggaccctccgtgttcctgttccccccaaagcccaaggacaccctgatgatcagccggacccccgaagtgacctgcgtggtggtggacgtgtcccaggaagatcccgaggtccagttcaactggtacgtggacggcgtggaagtgcacaacgccaagaccaagcccagagaggaacagttcaacagcacctaccgggtggtgtccgtgctgaccgtgctgcaccaggactggctgaacggcaaagagtacaagtgcaaggtctccaacaagggcctgcccagctccatcgagaaaaccatcagcaaggccaagggccagccccgcgagccccaggtgtacacactgccccccagccaggaagagatgaccaagaaccaggtgtccctgacctgcctcgtgaagggcttctaccccagcgatatcgccgtggaatgggagagcaacggccagcccgagaacaactacaagaccaccccccctgtgctggacagcgacggcagcttcttcctgtactcccggctgaccgtcgacaagagccggtggcaggaaggcaacgtcttcagctgcagcgtgatgcacgaggccctgcacaaccactacacccagaagtccctgagcctgagcctggga

SEQ ID NO: 126 - protein, 621 aa, Artificial
  heavy chain of PD-L1-PLGLAG-NanoLuc (N-terminal fusion)
MVFTLEDFVGDWRQTAGYNLDQVLEQGGVSSLFQNLGVSVTPIQRIVLSGENGLKIDIHVIIPYEGLSGDQMGQIEKIFKVVYPVDDHHFKVILHYGTLVIDGVTPNMIDYFGRPYEGIAVFDGKKITVTGTLWNGNKIIDERLINPDGSLLFRVTINGVTGWRLCERILAPLGLAGEVQLVESGGGLVQPGGSLRLSCAASGFTFSDSWIHWVRQAPGKGLEWVAWISPYGGSTYYADSVKGRFTISADTSKNTAYLQMNSLRAEDTAVYYCARRHWPGGFDYWGQGTLVTVSAASTKGPSVFPLAPCSRSTSESTAALGCLVKDYFPEPVTVSWNSGALTSGVHTFPAVLQSSGLYSLSSVVTVPSSSLGTKTYTCNVDHKPSNTKVDKRVESKYGPPCPPCPAPEFLGGPSVFLFPPKPKDTLMISRTPEVTCVVVDVSQEDPEVQFNWYVDGVEVHNAKTKPREEQFNSTYRVVSVLTVLHQDWLNGKEYKCKVSNKGLPSSIEKTISKAKGQPREPQVYTLPPSQEEMTKNQVSLTCLVKGFYPSDIAVEWESNGQPENNYKTTPPVLDSDGSFFLYSRLTVDKSRWQEGNVFSCSVMHEALHNHYTQKSLSLSLG

SEQ ID NO: 127 - DNA, 1173 bp, Artificial
  light chain of PD-L1-PLGLAG-NanoLuc (N-terminal fusion)
atggtcttcacactcgaagatttcgttggggactggcgacagacagccggctacaacctggaccaagtccttgaacagggaggtgtgtccagtttgtttcagaatctcggggtgtccgtaactccgatccaaaggattgtcctgagcggtgaaaatgggctgaagatcgacatccatgtcatcatcccgtatgaaggtctgagcggcgaccaaatgggccagatcgaaaaaatttttaaggtggtgtaccctgtggatgatcatcactttaaggtgatcctgcactatggcacactggtaatcgacggggttacgccgaacatgatcgactatttcggacggccgtatgaaggcatcgccgtgttcgacggcaaaaagatcactgtaacagggaccctgtggaacggcaacaaaattatcgacgagcgcctgatcaaccccgacggctccctgctgttccgagtaaccatcaacggagtgaccggctggcggctgtgcgaacgcattctggcgccgctgggcctggcgggcgacatccagatgacccaatccccatcctccttgagcgcatctgtaggagacagagtcaccatcacctgcagggcttcacaggatgttagcacagctgtggcttggtaccagcagaaacctggaaaggccccaaaactgctgatatacagcgcctcattcctgtacagcggagtgccctctcgctttagtggctctgggagtggcactgatttcacactgactatttctagtctgcagcccgaagatttcgccacttactattgccagcagtatctctatcaccccgccacctttgggcagggcacaaaggtcgagattaagcgtacggtggccgctcccagcgtgttcatcttcccacccagcgacgagcagctgaagtctggcaccgccagcgtcgtgtgcctgctgaacaacttctacccccgcgaggccaaggtgcagtggaaggtggacaacgccctgcagtccggcaacagccaggaaagcgtcaccgagcaggacagcaaggactccacctacagcctgagcagcaccctgaccctgagcaaggccgactacgagaagcacaaggtgtacgcctgcgaagtgacccaccagggcctgtccagccccgtgaccaagagcttcaaccggggcgagtgc

SEQ ID NO: 128 - protein, 391 aa, Artificial
  light chain of PD-L1-PLGLAG-NanoLuc (N-terminal fusion)
MVFTLEDFVGDWRQTAGYNLDQVLEQGGVSSLFQNLGVSVTPIQRIVLSGENGLKIDIHVIIPYEGLSGDQMGQIEKIFKVVYPVDDHHFKVILHYGTLVIDGVTPNMIDYFGRPYEGIAVFDGKKITVTGTLWNGNKIIDERLINPDGSLLFRVTINGVTGWRLCERILAPLGLAGDIQMTQSPSSLSASVGDRVTITCRASQDVSTAVAWYQQKPGKAPKLLIYSASFLYSGVPSRFSGSGSGTDFTLTISSLQPEDFATYYCQQYLYHPATFGQGTKVEIKRTVAAPSVFIFPPSDEQLKSGTASVVCLLNNFYPREAKVQWKVDNALQSGNSQESVTEQDSKDSTYSLSSTLTLSKADYEKHKVYACEVTHQGLSSPVTKSFNRGEC

SEQ ID NO: 129 - DNA, 1749 bp, Artificial
  heavy chain of PD-L1-PLGLAG-IL2 (C-terminal fusion)
gaagtccaactggtcgaaagcggtggaggtctggtacagccaggaggaagtttgagactgtcatgcgctgcttccgggtttactttcagcgactcctggattcactgggttcgtcaggcacctggaaaggggcttgagtgggttgcatggatttccccatacggcggctctacatactacgctgacagcgtcaagggcaggtttacaataagcgccgatacctctaaaaacaccgcctacctgcagatgaatagtttgcgagccgaggataccgccgtgtattattgtgcccggcgccattggcccggcggcttcgattattgggggcaggggacacttgtgacagtgtctgcagcctctaccaagggccccagcgtgttccctctggccccctgcagcagaagcaccagcgagtctacagccgccctgggatgcctggtcaaggactacttccccgagcccgtgaccgtgtcctggaactctggcgccctgaccagcggcgtgcacacctttccagccgtgctgcagagcagcggcctgtacagcctgagcagcgtcgtgaccgtgcctagcagcagcctgggcaccaagacctacacctgtaacgtggaccacaagcccagcaacaccaaggtggacaagcgggtggaatctaagtacggccctccctgccccccctgcccagcccctgaatttctgggcggaccctccgtgttcctgttccccccaaagcccaaggacaccctgatgatcagccggacccccgaagtgacctgcgtggtggtggacgtgtcccaggaagatcccgaggtccagttcaactggtacgtggacggcgtggaagtgcacaacgccaagaccaagcccagagaggaacagttcaacagcacctaccgggtggtgtccgtgctgaccgtgctgcaccaggactggctgaacggcaaagagtacaagtgcaaggtctccaacaagggcctgcccagctccatcgagaaaaccatcagcaaggccaagggccagccccgcgagccccaggtgtacacactgccccccagccaggaagagatgaccaagaaccaggtgtccctgacctgcctcgtgaagggcttctaccccagcgatatcgccgtggaatgggagagcaacggccagcccgagaacaactacaagaccaccccccctgtgctggacagcgacggcagcttcttcctgtactcccggctgaccgtcgacaagagccggtggcaggaaggcaacgtcttcagctgcagcgtgatgcacgaggccctgcacaaccactacacccagaagtccctgagcctgagcctgggaccgctgggcctggcgggcgcacctacctcgagttctacaaagaaaacacagctacaactggagcatttactgctggatttacagatgattttgaatggaattaataattacaagaatcccaaactcaccaggatgctcacatttaagttttacatgcccaagaaggccacagaactgaaacatcttcagtgtctagaagaagaactcaaacctctggaggaagtgctaaatttagctcaaagcaaaaactttcacttaagacccagggacttaatcagcaatatcaacgtaatagttctggaactaaagggatctgaaacaacattcatgtgtgaatatgctgatgagacagcaaccattgtagaatttctgaacagatggattaccttttgtcaaagcatcatctcaacactgact

SEQ ID NO: 130 - protein, 583 aa, Artificial
  heavy chain of PD-L1-PLGLAG-IL2 (C-terminal fusion)
EVQLVESGGGLVQPGGSLRLSCAASGFTFSDSWIHWVRQAPGKGLEWVAWISPYGGSTYYADSVKGRFTISADTSKNTAYLQMNSLRAEDTAVYYCARRHWPGGFDYWGQGTLVTVSAASTKGPSVFPLAPCSRSTSESTAALGCLVKDYFPEPVTVSWNSGALTSGVHTFPAVLQSSGLYSLSSVVTVPSSSLGTKTYTCNVDHKPSNTKVDKRVESKYGPPCPPCPAPEFLGGPSVFLFPPKPKDTLMISRTPEVTCVVVDVSQEDPEVQFNWYVDGVEVHNAKTKPREEQFNSTYRVVSVLTVLHQDWLNGKEYKCKVSNKGLPSSIEKTISKAKGQPREPQVYTLPPSQEEMTKNQVSLTCLVKGFYPSDIAVEWESNGQPENNYKTTPPVLDSDGSFFLYSRLTVDKSRWQEGNVFSCSVMHEALHNHYTQKSLSLSLGPLGLAGAPTSSSTKKTQLQLEHLLLDLQMILNGINNYKNPKLTRMLTFKFYMPKKATELKHLQCLEEELKPLEEVLNLAQSKNFHLRPRDLISNINVIVLELKGSETTFMCEYADETATIVEFLNRWITFCQSIISTLT

SEQ ID NO: 131 - DNA, 1059 bp, Artificial
  light chain of PD-L1-PLGLAG-IL2 (C-terminal fusion)
gacatccagatgacccaatccccatcctccttgagcgcatctgtaggagacagagtcaccatcacctgcagggcttcacaggatgttagcacagctgtggcttggtaccagcagaaacctggaaaggccccaaaactgctgatatacagcgcctcattcctgtacagcggagtgccctctcgctttagtggctctgggagtggcactgatttcacactgactatttctagtctgcagcccgaagatttcgccacttactattgccagcagtatctctatcaccccgccacctttgggcagggcacaaaggtcgagattaagcgtacggtggccgctcccagcgtgttcatcttcccacccagcgacgagcagctgaagtctggcaccgccagcgtcgtgtgcctgctgaacaacttctacccccgcgaggccaaggtgcagtggaaggtggacaacgccctgcagtccggcaacagccaggaaagcgtcaccgagcaggacagcaaggactccacctacagcctgagcagcaccctgaccctgagcaaggccgactacgagaagcacaaggtgtacgcctgcgaagtgacccaccagggcctgtccagccccgtgaccaagagcttcaaccggggcgagtgcccgctgggcctggcgggcgcacctacctcgagttctacaaagaaaacacagctacaactggagcatttactgctggatttacagatgattttgaatggaattaataattacaagaatcccaaactcaccaggatgctcacatttaagttttacatgcccaagaaggccacagaactgaaacatcttcagtgtctagaagaagaactcaaacctctggaggaagtgctaaatttagctcaaagcaaaaactttcacttaagacccagggacttaatcagcaatatcaacgtaatagttctggaactaaagggatctgaaacaacattcatgtgtgaatatgctgatgagacagcaaccattgtagaatttctgaacagatggattaccttttgtcaaagcatcatctcaacactgact

SEQ ID NO: 132 - protein, 353 aa, Artificial
  light chain of PD-L1-PLGLAG-IL2 (C-terminal fusion)
DIQMTQSPSSLSASVGDRVTITCRASQDVSTAVAWYQQKPGKAPKLLIYSASFLYSGVPSRFSGSGSGTDFTLTISSLQPEDFATYYCQQYLYHPATFGQGTKVEIKRTVAAPSVFIFPPSDEQLKSGTASVVCLLNNFYPREAKVQWKVDNALQSGNSQESVTEQDSKDSTYSLSSTLTLSKADYEKHKVYACEVTHQGLSSPVTKSFNRGECPLGLAGAPTSSSTKKTQLQLEHLLLDLQMILNGINNYKNPKLTRMLTFKFYMPKKATELKHLQCLEEELKPLEEVLNLAQSKNFHLRPRDLISNINVIVLELKGSETTFMCEYADETATIVEFLNRWITFCQSIISTLT

SEQ ID NO: 133 - DNA, 1749 bp, Artificial
  heavy chain of PD-L1-PLGLAG-IL2 (N-terminal fusion)
gcacctacctcgagttctacaaagaaaacacagctacaactggagcatttactgctggatttacagatgattttgaatggaattaataattacaagaatcccaaactcaccaggatgctcacatttaagttttacatgcccaagaaggccacagaactgaaacatcttcagtgtctagaagaagaactcaaacctctggaggaagtgctaaatttagctcaaagcaaaaactttcacttaagacccagggacttaatcagcaatatcaacgtaatagttctggaactaaagggatctgaaacaacattcatgtgtgaatatgctgatgagacagcaaccattgtagaatttctgaacagatggattaccttttgtcaaagcatcatctcaacactgactccgctgggcctggcgggcgaagtccaactggtcgaaagcggtggaggtctggtacagccaggaggaagtttgagactgtcatgcgctgcttccgggtttactttcagcgactcctggattcactgggttcgtcaggcacctggaaaggggcttgagtgggttgcatggatttccccatacggcggctctacatactacgctgacagcgtcaagggcaggtttacaataagcgccgatacctctaaaaacaccgcctacctgcagatgaatagtttgcgagccgaggataccgccgtgtattattgtgcccggcgccattggcccggcggcttcgattattgggggcaggggacacttgtgacagtgtctgcagcctctaccaagggccccagcgtgttccctctggccccctgcagcagaagcaccagcgagtctacagccgccctgggatgcctggtcaaggactacttccccgagcccgtgaccgtgtcctggaactctggcgccctgaccagcggcgtgcacacctttccagccgtgctgcagagcagcggcctgtacagcctgagcagcgtcgtgaccgtgcctagcagcagcctgggcaccaagacctacacctgtaacgtggaccacaagcccagcaacaccaaggtggacaagcgggtggaatctaagtacggccctccctgccccccctgcccagcccctgaatttctgggcggaccctccgtgttcctgttccccccaaagcccaaggacaccctgatgatcagccggacccccgaagtgacctgcgtggtggtggacgtgtcccaggaagatcccgaggtccagttcaactggtacgtggacggcgtggaagtgcacaacgccaagaccaagcccagagaggaacagttcaacagcacctaccgggtggtgtccgtgctgaccgtgctgcaccaggactggctgaacggcaaagagtacaagtgcaaggtctccaacaagggcctgcccagctccatcgagaaaaccatcagcaaggccaagggccagccccgcgagccccaggtgtacacactgccccccagccaggaagagatgaccaagaaccaggtgtccctgacctgcctcgtgaagggcttctaccccagcgatatcgccgtggaatgggagagcaacggccagcccgagaacaactacaagaccaccccccctgtgctggacagcgacggcagcttcttcctgtactcccggctgaccgtcgacaagagccggtggcaggaaggcaacgtcttcagctgcagcgtgatgcacgaggccctgcacaaccactacacccagaagtccctgagcctgagcctggga

SEQ ID NO: 134 - protein, 583 aa, Artificial
  heavy chain of PD-L1-PLGLAG-IL2 (N-terminal fusion)
APTSSSTKKTQLQLEHLLLDLQMILNGINNYKNPKLTRMLTFKFYMPKKATELKHLQCLEEELKPLEEVLNLAQSKNFHLRPRDLISNINVIVLELKGSETTFMCEYADETATIVEFLNRWITFCQSIISTLTPLGLAGEVQLVESGGGLVQPGGSLRLSCAASGFTFSDSWIHWVRQAPGKGLEWVAWISPYGGSTYYADSVKGRFTISADTSKNTAYLQMNSLRAEDTAVYYCARRHWPGGFDYWGQGTLVTVSAASTKGPSVFPLAPCSRSTSESTAALGCLVKDYFPEPVTVSWNSGALTSGVHTFPAVLQSSGLYSLSSVVTVPSSSLGTKTYTCNVDHKPSNTKVDKRVESKYGPPCPPCPAPEFLGGPSVFLFPPKPKDTLMISRTPEVTCVVVDVSQEDPEVQFNWYVDGVEVHNAKTKPREEQFNSTYRVVSVLTVLHQDWLNGKEYKCKVSNKGLPSSIEKTISKAKGQPREPQVYTLPPSQEEMTKNQVSLTCLVKGFYPSDIAVEWESNGQPENNYKTTPPVLDSDGSFFLYSRLTVDKSRWQEGNVFSCSVMHEALHNHYTQKSLSLSLG

SEQ ID NO: 135 - DNA, 1059 bp, Artificial
  light chain of PD-L1-PLGLAG-IL2 (N-terminal fusion)
gcacctacctcgagttctacaaagaaaacacagctacaactggagcatttactgctggatttacagatgattttgaatggaattaataattacaagaatcccaaactcaccaggatgctcacatttaagttttacatgcccaagaaggccacagaactgaaacatcttcagtgtctagaagaagaactcaaacctctggaggaagtgctaaatttagctcaaagcaaaaactttcacttaagacccagggacttaatcagcaatatcaacgtaatagttctggaactaaagggatctgaaacaacattcatgtgtgaatatgctgatgagacagcaaccattgtagaatttctgaacagatggattaccttttgtcaaagcatcatctcaacactgactccgctgggcctggcgggcgacatccagatgacccaatccccatcctccttgagcgcatctgtaggagacagagtcaccatcacctgcagggcttcacaggatgttagcacagctgtggcttggtaccagcagaaacctggaaaggccccaaaactgctgatatacagcgcctcattcctgtacagcggagtgccctctcgctttagtggctctgggagtggcactgatttcacactgactatttctagtctgcagcccgaagatttcgccacttactattgccagcagtatctctatcaccccgccacctttgggcagggcacaaaggtcgagattaagcgtacggtggccgctcccagcgtgttcatcttcccacccagcgacgagcagctgaagtctggcaccgccagcgtcgtgtgcctgctgaacaacttctacccccgcgaggccaaggtgcagtggaaggtggacaacgccctgcagtccggcaacagccaggaaagcgtcaccgagcaggacagcaaggactccacctacagcctgagcagcaccctgaccctgagcaaggccgactacgagaagcacaaggtgtacgcctgcgaagtgacccaccagggcctgtccagccccgtgaccaagagcttcaaccggggcgagtgc

SEQ ID NO: 136 - protein, 353 aa, Artificial
  light chain of PD-L1-PLGLAG-IL2 (N-terminal fusion)
APTSSSTKKTQLQLEHLLLDLQMILNGINNYKNPKLTRMLTFKFYMPKKATELKHLQCLEEELKPLEEVLNLAQSKNFHLRPRDLISNINVIVLELKGSETTFMCEYADETATIVEFLNRWITFCQSIISTLTPLGLAGDIQMTQSPSSLSASVGDRVTITCRASQDVSTAVAWYQQKPGKAPKLLIYSASFLYSGVPSRFSGSGSGTDFTLTISSLQPEDFATYYCQQYLYHPATFGQGTKVEIKRTVAAPSVFIFPPSDEQLKSGTASVVCLLNNFYPREAKVQWKVDNALQSGNSQESVTEQDSKDSTYSLSSTLTLSKADYEKHKVYACEVTHQGLSSPVTKSFNRGEC

SEQ ID NO: 137 - DNA, 1869 bp, Artificial
  heavy chain of PD-L1-GIVGPL-NanoLuc (C-terminal fusion)
gaagtccaactggtcgaaagcggtggaggtctggtacagccaggaggaagtttgagactgtcatgcgctgcttccgggtttactttcagcgactcctggattcactgggttcgtcaggcacctggaaaggggcttgagtgggttgcatggatttccccatacggcggctctacatactacgctgacagcgtcaagggcaggtttacaataagcgccgatacctctaaaaacaccgcctacctgcagatgaatagtttgcgagccgaggataccgccgtgtattattgtgcccggcgccattggcccggcggcttcgattattgggggcaggggacacttgtgacagtgtctgcagcctctaccaagggccccagcgtgttccctctggccccctgcagcagaagcaccagcgagtctacagccgccctgggatgcctggtcaaggactacttccccgagcccgtgaccgtgtcctggaactctggcgccctgaccagcggcgtgcacacctttccagccgtgctgcagagcagcggcctgtacagcctgagcagcgtcgtgaccgtgcctagcagcagcctgggcaccaagacctacacctgtaacgtggaccacaagcccagcaacaccaaggtggacaagcgggtggaatctaagtacggccctccctgccccccctgcccagcccctgaatttctgggcggaccctccgtgttcctgttccccccaaagcccaaggacaccctgatgatcagccggacccccgaagtgacctgcgtggtggtggacgtgtcccaggaagatcccgaggtccagttcaactggtacgtggacggcgtggaagtgcacaacgccaagaccaagcccagagaggaacagttcaacagcacctaccgggtggtgtccgtgctgaccgtgctgcaccaggactggctgaacggcaaagagtacaagtgcaaggtctccaacaagggcctgcccagctccatcgagaaaaccatcagcaaggccaagggccagccccgcgagccccaggtgtacacactgccccccagccaggaagagatgaccaagaaccaggtgtccctgacctgcctcgtgaagggcttctaccccagcgatatcgccgtggaatgggagagcaacggccagcccgagaacaactacaagaccaccccccctgtgctggacagcgacggcagcttcttcctgtactcccggctgaccgtcgacaagagccggtggcaggaaggcaacgtcttcagctgcagcgtgatgcacgaggccctgcacaaccactacacccagaagtccctgagcctgagcctgggaggcattgtgggaccgctgctcgagatggtcttcacactcgaagatttcgttggggactggcgacagacagccggctacaacctggaccaagtccttgaacagggaggtgtgtccagtttgtttcagaatctcggggtgtccgtaactccgatccaaaggattgtcctgagcggtgaaaatgggctgaagatcgacatccatgtcatcatcccgtatgaaggtctgagcggcgaccaaatgggccagatcgaaaaaatttttaaggtggtgtaccctgtggatgatcatcactttaaggtgatcctgcactatggcacactggtaatcgacggggttacgccgaacatgatcgactatttcggacggccgtatgaaggcatcgccgtgttcgacggcaaaaagatcactgtaacagggaccctgtggaacggcaacaaaattatcgacgagcgcctgatcaaccccgacggctccctgctgttccgagtaaccatcaacggagtgaccggctggcggctgtgcgaacgcattctggcg

SEQ ID NO: 138 - protein, 623 aa, Artificial
  heavy chain of PD-L1-GIVGPL-NanoLuc (C-terminal fusion)
EVQLVESGGGLVQPGGSLRLSCAASGFTFSDSWIHWVRQAPGKGLEWVAWISPYGGSTYYADSVKGRFTISADTSKNTAYLQMNSLRAEDTAVYYCARRHWPGGFDYWGQGTLVTVSAASTKGPSVFPLAPCSRSTSESTAALGCLVKDYFPEPVTVSWNSGALTSGVHTFPAVLQSSGLYSLSSVVTVPSSSLGTKTYTCNVDHKPSNTKVDKRVESKYGPPCPPCPAPEFLGGPSVFLFPPKPKDTLMISRTPEVTCVVVDVSQEDPEVQFNWYVDGVEVHNAKTKPREEQFNSTYRVVSVLTVLHQDWLNGKEYKCKVSNKGLPSSIEKTISKAKGQPREPQVYTLPPSQEEMTKNQVSLTCLVKGFYPSDIAVEWESNGQPENNYKTTPPVLDSDGSFFLYSRLTVDKSRWQEGNVFSCSVMHEALHNHYTQKSLSLSLGGIVGPLLEMVFTLEDFVGDWRQTAGYNLDQVLEQGGVSSLFQNLGVSVTPIQRIVLSGENGLKIDIHVIIPYEGLSGDQMGQIEKIFKVVYPVDDHHFKVILHYGTLVIDGVTPNMIDYFGRPYEGIAVFDGKKITVTGTLWNGNKIIDERLINPDGSLLFRVTINGVTGWRLCERILA

SEQ ID NO: 139 - DNA, 1179 bp, Artificial
  light chain of PD-L1-GIVGPL-NanoLuc (C-terminal fusion)
gacatccagatgacccaatccccatcctccttgagcgcatctgtaggagacagagtcaccatcacctgcagggcttcacaggatgttagcacagctgtggcttggtaccagcagaaacctggaaaggccccaaaactgctgatatacagcgcctcattcctgtacagcggagtgccctctcgctttagtggctctgggagtggcactgatttcacactgactatttctagtctgcagcccgaagatttcgccacttactattgccagcagtatctctatcaccccgccacctttgggcagggcacaaaggtcgagattaagcgtacggtggccgctcccagcgtgttcatcttcccacccagcgacgagcagctgaagtctggcaccgccagcgtcgtgtgcctgctgaacaacttctacccccgcgaggccaaggtgcagtggaaggtggacaacgccctgcagtccggcaacagccaggaaagcgtcaccgagcaggacagcaaggactccacctacagcctgagcagcaccctgaccctgagcaaggccgactacgagaagcacaaggtgtacgcctgcgaagtgacccaccagggcctgtccagccccgtgaccaagagcttcaaccggggcgagtgcggcattgtgggaccgctgctcgagatggtcttcacactcgaagatttcgttggggactggcgacagacagccggctacaacctggaccaagtccttgaacagggaggtgtgtccagtttgtttcagaatctcggggtgtccgtaactccgatccaaaggattgtcctgagcggtgaaaatgggctgaagatcgacatccatgtcatcatcccgtatgaaggtctgagcggcgaccaaatgggccagatcgaaaaaatttttaaggtggtgtaccctgtggatgatcatcactttaaggtgatcctgcactatggcacactggtaatcgacggggttacgccgaacatgatcgactatttcggacggccgtatgaaggcatcgccgtgttcgacggcaaaaagatcactgtaacagggaccctgtggaacggcaacaaaattatcgacgagcgcctgatcaaccccgacggctccctgctgttccgagtaaccatcaacggagtgaccggctggcggctgtgcgaacgcattctggcg

SEQ ID NO: 140 - protein, 393 aa, Artificial
  light chain of PD-L1-GIVGPL-NanoLuc (C-terminal fusion)
DIQMTQSPSSLSASVGDRVTITCRASQDVSTAVAWYQQKPGKAPKLLIYSASFLYSGVPSRFSGSGSGTDFTLTISSLQPEDFATYYCQQYLYHPATFGQGTKVEIKRTVAAPSVFIFPPSDEQLKSGTASVVCLLNNFYPREAKVQWKVDNALQSGNSQESVTEQDSKDSTYSLSSTLTLSKADYEKHKVYACEVTHQGLSSPVTKSFNRGECGIVGPLLEMVFTLEDFVGDWRQTAGYNLDQVLEQGGVSSLFQNLGVSVTPIQRIVLSGENGLKIDIHVIIPYEGLSGDQMGQIEKIFKVVYPVDDHHFKVILHYGTLVIDGVTPNMIDYFGRPYEGIAVFDGKKITVTGTLWNGNKIIDERLINPDGSLLFRVTINGVTGWRLCERILA

SEQ ID NO: 141 - DNA, 1863 bp, Artificial
  heavy chain of PD-L1-GIVGPL-NanoLuc (N-terminal fusion)
atggtcttcacactcgaagatttcgttggggactggcgacagacagccggctacaacctggaccaagtccttgaacagggaggtgtgtccagtttgtttcagaatctcggggtgtccgtaactccgatccaaaggattgtcctgagcggtgaaaatgggctgaagatcgacatccatgtcatcatcccgtatgaaggtctgagcggcgaccaaatgggccagatcgaaaaaatttttaaggtggtgtaccctgtggatgatcatcactttaaggtgatcctgcactatggcacactggtaatcgacggggttacgccgaacatgatcgactatttcggacggccgtatgaaggcatcgccgtgttcgacggcaaaaagatcactgtaacagggaccctgtggaacggcaacaaaattatcgacgagcgcctgatcaaccccgacggctccctgctgttccgagtaaccatcaacggagtgaccggctggcggctgtgcgaacgcattctggcgggcattgtgggaccgctggaagtccaactggtcgaaagcggtggaggtctggtacagccaggaggaagtttgagactgtcatgcgctgcttccgggtttactttcagcgactcctggattcactgggttcgtcaggcacctggaaaggggcttgagtgggttgcatggatttccccatacggcggctctacatactacgctgacagcgtcaagggcaggtttacaataagcgccgatacctctaaaaacaccgcctacctgcagatgaatagtttgcgagccgaggataccgccgtgtattattgtgcccggcgccattggcccggcggcttcgattattgggggcaggggacacttgtgacagtgtctgcagcctctaccaagggccccagcgtgttccctctggccccctgcagcagaagcaccagcgagtctacagccgccctgggatgcctggtcaaggactacttccccgagcccgtgaccgtgtcctggaactctggcgccctgaccagcggcgtgcacacctttccagccgtgctgcagagcagcggcctgtacagcctgagcagcgtcgtgaccgtgcctagcagcagcctgggcaccaagacctacacctgtaacgtggaccacaagcccagcaacaccaaggtggacaagcgggtggaatctaagtacggccctccctgccccccctgcccagcccctgaatttctgggcggaccctccgtgttcctgttccccccaaagcccaaggacaccctgatgatcagccggacccccgaagtgacctgcgtggtggtggacgtgtcccaggaagatcccgaggtccagttcaactggtacgtggacggcgtggaagtgcacaacgccaagaccaagcccagagaggaacagttcaacagcacctaccgggtggtgtccgtgctgaccgtgctgcaccaggactggctgaacggcaaagagtacaagtgcaaggtctccaacaagggcctgcccagctccatcgagaaaaccatcagcaaggccaagggccagccccgcgagccccaggtgtacacactgccccccagccaggaagagatgaccaagaaccaggtgtccctgacctgcctcgtgaagggcttctaccccagcgatatcgccgtggaatgggagagcaacggccagcccgagaacaactacaagaccaccccccctgtgctggacagcgacggcagcttcttcctgtactcccggctgaccgtcgacaagagccggtggcaggaaggcaacgtcttcagctgcagcgtgatgcacgaggccctgcacaaccactacacccagaagtccctgagcctgagcctggga

SEQ ID NO: 142 - protein, 621 aa, Artificial
  heavy chain of PD-L1-GIVGPL-NanoLuc (N-terminal fusion)
MVFTLEDFVGDWRQTAGYNLDQVLEQGGVSSLFQNLGVSVTPIQRIVLSGENGLKIDIHVIIPYEGLSGDQMGQIEKIFKVVYPVDDHHFKVILHYGTLVIDGVTPNMIDYFGRPYEGIAVFDGKKITVTGTLWNGNKIIDERLINPDGSLLFRVTINGVTGWRLCERILAGIVGPLEVQLVESGGGLVQPGGSLRLSCAASGFTFSDSWIHWVRQAPGKGLEWVAWISPYGGSTYYADSVKGRFTISADTSKNTAYLQMNSLRAEDTAVYYCARRHWPGGFDYWGQGTLVTVSAASTKGPSVFPLAPCSRSTSESTAALGCLVKDYFPEPVTVSWNSGALTSGVHTFPAVLQSSGLYSLSSVVTVPSSSLGTKTYTCNVDHKPSNTKVDKRVESKYGPPCPPCPAPEFLGGPSVFLFPPKPKDTLMISRTPEVTCVVVDVSQEDPEVQFNWYVDGVEVHNAKTKPREEQFNSTYRVVSVLTVLHQDWLNGKEYKCKVSNKGLPSSIEKTISKAKGQPREPQVYTLPPSQEEMTKNQVSLTCLVKGFYPSDIAVEWESNGQPENNYKTTPPVLDSDGSFFLYSRLTVDKSRWQEGNVFSCSVMHEALHNHYTQKSLSLSLG

SEQ ID NO: 143 - DNA, 1173 bp, Artificial
  light chain of PD-L1-GIVGPL-NanoLuc (N-terminal fusion)
atggtcttcacactcgaagatttcgttggggactggcgacagacagccggctacaacctggaccaagtccttgaacagggaggtgtgtccagtttgtttcagaatctcggggtgtccgtaactccgatccaaaggattgtcctgagcggtgaaaatgggctgaagatcgacatccatgtcatcatcccgtatgaaggtctgagcggcgaccaaatgggccagatcgaaaaaatttttaaggtggtgtaccctgtggatgatcatcactttaaggtgatcctgcactatggcacactggtaatcgacggggttacgccgaacatgatcgactatttcggacggccgtatgaaggcatcgccgtgttcgacggcaaaaagatcactgtaacagggaccctgtggaacggcaacaaaattatcgacgagcgcctgatcaaccccgacggctccctgctgttccgagtaaccatcaacggagtgaccggctggcggctgtgcgaacgcattctggcgggcattgtgggaccgctggacatccagatgacccaatccccatcctccttgagcgcatctgtaggagacagagtcaccatcacctgcagggcttcacaggatgttagcacagctgtggcttggtaccagcagaaacctggaaaggccccaaaactgctgatatacagcgcctcattcctgtacagcggagtgccctctcgctttagtggctctgggagtggcactgatttcacactgactatttctagtctgcagcccgaagatttcgccacttactattgccagcagtatctctatcaccccgccacctttgggcagggcacaaaggtcgagattaagcgtacggtggccgctcccagcgtgttcatcttcccacccagcgacgagcagctgaagtctggcaccgccagcgtcgtgtgcctgctgaacaacttctacccccgcgaggccaaggtgcagtggaaggtggacaacgccctgcagtccggcaacagccaggaaagcgtcaccgagcaggacagcaaggactccacctacagcctgagcagcaccctgaccctgagcaaggccgactacgagaagcacaaggtgtacgcctgcgaagtgacccaccagggcctgtccagccccgtgaccaagagcttcaaccggggcgagtgc

SEQ ID NO: 144 - protein, 391 aa, Artificial
  light chain of PD-L1-GIVGPL-NanoLuc (N-terminal fusion)
MVFTLEDFVGDWRQTAGYNLDQVLEQGGVSSLFQNLGVSVTPIQRIVLSGENGLKIDIHVIIPYEGLSGDQMGQIEKIFKVVYPVDDHHFKVILHYGTLVIDGVTPNMIDYFGRPYEGIAVFDGKKITVTGTLWNGNKIIDERLINPDGSLLFRVTINGVTGWRLCERILAGIVGPLDIQMTQSPSSLSASVGDRVTITCRASQDVSTAVAWYQQKPGKAPKLLIYSASFLYSGVPSRFSGSGSGTDFTLTISSLQPEDFATYYCQQYLYHPATFGQGTKVEIKRTVAAPSVFIFPPSDEQLKSGTASVVCLLNNFYPREAKVQWKVDNALQSGNSQESVTEQDSKDSTYSLSSTLTLSKADYEKHKVYACEVTHQGLSSPVTKSFNRGEC

SEQ ID NO: 145 - DNA, 1749 bp, Artificial
  heavy chain of PD-L1-GIVGPL-IL2 (C-terminal fusion)
gaagtccaactggtcgaaagcggtggaggtctggtacagccaggaggaagtttgagactgtcatgcgctgcttccgggtttactttcagcgactcctggattcactgggttcgtcaggcacctggaaaggggcttgagtgggttgcatggatttccccatacggcggctctacatactacgctgacagcgtcaagggcaggtttacaataagcgccgatacctctaaaaacaccgcctacctgcagatgaatagtttgcgagccgaggataccgccgtgtattattgtgcccggcgccattggcccggcggcttcgattattgggggcaggggacacttgtgacagtgtctgcagcctctaccaagggccccagcgtgttccctctggccccctgcagcagaagcaccagcgagtctacagccgccctgggatgcctggtcaaggactacttccccgagcccgtgaccgtgtcctggaactctggcgccctgaccagcggcgtgcacacctttccagccgtgctgcagagcagcggcctgtacagcctgagcagcgtcgtgaccgtgcctagcagcagcctgggcaccaagacctacacctgtaacgtggaccacaagcccagcaacaccaaggtggacaagcgggtggaatctaagtacggccctccctgccccccctgcccagcccctgaatttctgggcggaccctccgtgttcctgttccccccaaagcccaaggacaccctgatgatcagccggacccccgaagtgacctgcgtggtggtggacgtgtcccaggaagatcccgaggtccagttcaactggtacgtggacggcgtggaagtgcacaacgccaagaccaagcccagagaggaacagttcaacagcacctaccgggtggtgtccgtgctgaccgtgctgcaccaggactggctgaacggcaaagagtacaagtgcaaggtctccaacaagggcctgcccagctccatcgagaaaaccatcagcaaggccaagggccagccccgcgagccccaggtgtacacactgccccccagccaggaagagatgaccaagaaccaggtgtccctgacctgcctcgtgaagggcttctaccccagcgatatcgccgtggaatgggagagcaacggccagcccgagaacaactacaagaccaccccccctgtgctggacagcgacggcagcttcttcctgtactcccggctgaccgtcgacaagagccggtggcaggaaggcaacgtcttcagctgcagcgtgatgcacgaggccctgcacaaccactacacccagaagtccctgagcctgagcctgggaggcattgtgggaccgctggcacctacctcgagttctacaaagaaaacacagctacaactggagcatttactgctggatttacagatgattttgaatggaattaataattacaagaatcccaaactcaccaggatgctcacatttaagttttacatgcccaagaaggccacagaactgaaacatcttcagtgtctagaagaagaactcaaacctctggaggaagtgctaaatttagctcaaagcaaaaactttcacttaagacccagggacttaatcagcaatatcaacgtaatagttctggaactaaagggatctgaaacaacattcatgtgtgaatatgctgatgagacagcaaccattgtagaatttctgaacagatggattaccttttgtcaaagcatcatctcaacactgact

SEQ ID NO: 146 - protein, 583 aa, Artificial
  heavy chain of PD-L1-GIVGPL-IL2 (C-terminal fusion)
EVQLVESGGGLVQPGGSLRLSCAASGFTFSDSWIHWVRQAPGKGLEWVAWISPYGGSTYYADSVKGRFTISADTSKNTAYLQMNSLRAEDTAVYYCARRHWPGGFDYWGQGTLVTVSAASTKGPSVFPLAPCSRSTSESTAALGCLVKDYFPEPVTVSWNSGALTSGVHTFPAVLQSSGLYSLSSVVTVPSSSLGTKTYTCNVDHKPSNTKVDKRVESKYGPPCPPCPAPEFLGGPSVFLFPPKPKDTLMISRTPEVTCVVVDVSQEDPEVQFNWYVDGVEVHNAKTKPREEQFNSTYRVVSVLTVLHQDWLNGKEYKCKVSNKGLPSSIEKTISKAKGQPREPQVYTLPPSQEEMTKNQVSLTCLVKGFYPSDIAVEWESNGQPENNYKTTPPVLDSDGSFFLYSRLTVDKSRWQEGNVFSCSVMHEALHNHYTQKSLSLSLGGIVGPLAPTSSSTKKTQLQLEHLLLDLQMILNGINNYKNPKLTRMLTFKFYMPKKATELKHLQCLEEELKPLEEVLNLAQSKNFHLRPRDLISNINVIVLELKGSETTFMCEYADETATIVEFLNRWITFCQSIISTLT

SEQ ID NO: 147 - DNA, 1059 bp, Artificial
  light chain of PD-L1-GIVGPL-IL2 (C-terminal fusion)
gacatccagatgacccaatccccatcctccttgagcgcatctgtaggagacagagtcaccatcacctgcagggcttcacaggatgttagcacagctgtggcttggtaccagcagaaacctggaaaggccccaaaactgctgatatacagcgcctcattcctgtacagcggagtgccctctcgctttagtggctctgggagtggcactgatttcacactgactatttctagtctgcagcccgaagatttcgccacttactattgccagcagtatctctatcaccccgccacctttgggcagggcacaaaggtcgagattaagcgtacggtggccgctcccagcgtgttcatcttcccacccagcgacgagcagctgaagtctggcaccgccagcgtcgtgtgcctgctgaacaacttctacccccgcgaggccaaggtgcagtggaaggtggacaacgccctgcagtccggcaacagccaggaaagcgtcaccgagcaggacagcaaggactccacctacagcctgagcagcaccctgaccctgagcaaggccgactacgagaagcacaaggtgtacgcctgcgaagtgacccaccagggcctgtccagccccgtgaccaagagcttcaaccggggcgagtgcggcattgtgggaccgctggcacctacctcgagttctacaaagaaaacacagctacaactggagcatttactgctggatttacagatgattttgaatggaattaataattacaagaatcccaaactcaccaggatgctcacatttaagttttacatgcccaagaaggccacagaactgaaacatcttcagtgtctagaagaagaactcaaacctctggaggaagtgctaaatttagctcaaagcaaaaactttcacttaagacccagggacttaatcagcaatatcaacgtaatagttctggaactaaagggatctgaaacaacattcatgtgtgaatatgctgatgagacagcaaccattgtagaatttctgaacagatggattaccttttgtcaaagcatcatctcaacactgact

SEQ ID NO: 148 - protein, 353 aa, Artificial
  light chain of PD-L1-GIVGPL-IL2 (C-terminal fusion)
DIQMTQSPSSLSASVGDRVTITCRASQDVSTAVAWYQQKPGKAPKLLIYSASFLYSGVPSRFSGSGSGTDFTLTISSLQPEDFATYYCQQYLYHPATFGQGTKVEIKRTVAAPSVFIFPPSDEQLKSGTASVVCLLNNFYPREAKVQWKVDNALQSGNSQESVTEQDSKDSTYSLSSTLTLSKADYEKHKVYACEVTHQGLSSPVTKSFNRGECGIVGPLAPTSSSTKKTQLQLEHLLLDLQMILNGINNYKNPKLTRMLTFKFYMPKKATELKHLQCLEEELKPLEEVLNLAQSKNFHLRPRDLISNINVIVLELKGSETTFMCEYADETATIVEFLNRWITFCQSIISTLT

SEQ ID NO: 149 - DNA, 1749 bp, Artificial
  heavy chain of PD-L1-GIVGPL-IL2 (N-terminal fusion)
gcacctacctcgagttctacaaagaaaacacagctacaactggagcatttactgctggatttacagatgattttgaatggaattaataattacaagaatcccaaactcaccaggatgctcacatttaagttttacatgcccaagaaggccacagaactgaaacatcttcagtgtctagaagaagaactcaaacctctggaggaagtgctaaatttagctcaaagcaaaaactttcacttaagacccagggacttaatcagcaatatcaacgtaatagttctggaactaaagggatctgaaacaacattcatgtgtgaatatgctgatgagacagcaaccattgtagaatttctgaacagatggattaccttttgtcaaagcatcatctcaacactgactggcattgtgggaccgctggaagtccaactggtcgaaagcggtggaggtctggtacagccaggaggaagtttgagactgtcatgcgctgcttccgggtttactttcagcgactcctggattcactgggttcgtcaggcacctggaaaggggcttgagtgggttgcatggatttccccatacggcggctctacatactacgctgacagcgtcaagggcaggtttacaataagcgccgatacctctaaaaacaccgcctacctgcagatgaatagtttgcgagccgaggataccgccgtgtattattgtgcccggcgccattggcccggcggcttcgattattgggggcaggggacacttgtgacagtgtctgcagcctctaccaagggccccagcgtgttccctctggccccctgcagcagaagcaccagcgagtctacagccgccctgggatgcctggtcaaggactacttccccgagcccgtgaccgtgtcctggaactctggcgccctgaccagcggcgtgcacacctttccagccgtgctgcagagcagcggcctgtacagcctgagcagcgtcgtgaccgtgcctagcagcagcctgggcaccaagacctacacctgtaacgtggaccacaagcccagcaacaccaaggtggacaagcgggtggaatctaagtacggccctccctgccccccctgcccagcccctgaatttctgggcggaccctccgtgttcctgttccccccaaagcccaaggacaccctgatgatcagccggacccccgaagtgacctgcgtggtggtggacgtgtcccaggaagatcccgaggtccagttcaactggtacgtggacggcgtggaagtgcacaacgccaagaccaagcccagagaggaacagttcaacagcacctaccgggtggtgtccgtgctgaccgtgctgcaccaggactggctgaacggcaaagagtacaagtgcaaggtctccaacaagggcctgcccagctccatcgagaaaaccatcagcaaggccaagggccagccccgcgagccccaggtgtacacactgccccccagccaggaagagatgaccaagaaccaggtgtccctgacctgcctcgtgaagggcttctaccccagcgatatcgccgtggaatgggagagcaacggccagcccgagaacaactacaagaccaccccccctgtgctggacagcgacggcagcttcttcctgtactcccggctgaccgtcgacaagagccggtggcaggaaggcaacgtcttcagctgcagcgtgatgcacgaggccctgcacaaccactacacccagaagtccctgagcctgagcctggga

SEQ ID NO: 150 - protein, 583 aa, Artificial
  heavy chain of PD-L1-GIVGPL-IL2 (N-terminal fusion)
APTSSSTKKTQLQLEHLLLDLQMILNGINNYKNPKLTRMLTFKFYMPKKATELKHLQCLEEELKPLEEVLNLAQSKNFHLRPRDLISNINVIVLELKGSETTFMCEYADETATIVEFLNRWITFCQSIISTLTGIVGPLEVQLVESGGGLVQPGGSLRLSCAASGFTFSDSWIHWVRQAPGKGLEWVAWISPYGGSTYYADSVKGRFTISADTSKNTAYLQMNSLRAEDTAVYYCARRHWPGGFDYWGQGTLVTVSAASTKGPSVFPLAPCSRSTSESTAALGCLVKDYFPEPVTVSWNSGALTSGVHTFPAVLQSSGLYSLSSVVTVPSSSLGTKTYTCNVDHKPSNTKVDKRVESKYGPPCPPCPAPEFLGGPSVFLFPPKPKDTLMISRTPEVTCVVVDVSQEDPEVQFNWYVDGVEVHNAKTKPREEQFNSTYRVVSVLTVLHQDWLNGKEYKCKVSNKGLPSSIEKTISKAKGQPREPQVYTLPPSQEEMTKNQVSLTCLVKGFYPSDIAVEWESNGQPENNYKTTPPVLDSDGSFFLYSRLTVDKSRWQEGNVFSCSVMHEALHNHYTQKSLSLSLG

SEQ ID NO: 151 - DNA, 1059 bp, Artificial
  light chain of PD-L1-GIVGPL-IL2 (N-terminal fusion)
gcacctacctcgagttctacaaagaaaacacagctacaactggagcatttactgctggatttacagatgattttgaatggaattaataattacaagaatcccaaactcaccaggatgctcacatttaagttttacatgcccaagaaggccacagaactgaaacatcttcagtgtctagaagaagaactcaaacctctggaggaagtgctaaatttagctcaaagcaaaaactttcacttaagacccagggacttaatcagcaatatcaacgtaatagttctggaactaaagggatctgaaacaacattcatgtgtgaatatgctgatgagacagcaaccattgtagaatttctgaacagatggattaccttttgtcaaagcatcatctcaacactgactggcattgtgggaccgctggacatccagatgacccaatccccatcctccttgagcgcatctgtaggagacagagtcaccatcacctgcagggcttcacaggatgttagcacagctgtggcttggtaccagcagaaacctggaaaggccccaaaactgctgatatacagcgcctcattcctgtacagcggagtgccctctcgctttagtggctctgggagtggcactgatttcacactgactatttctagtctgcagcccgaagatttcgccacttactattgccagcagtatctctatcaccccgccacctttgggcagggcacaaaggtcgagattaagcgtacggtggccgctcccagcgtgttcatcttcccacccagcgacgagcagctgaagtctggcaccgccagcgtcgtgtgcctgctgaacaacttctacccccgcgaggccaaggtgcagtggaaggtggacaacgccctgcagtccggcaacagccaggaaagcgtcaccgagcaggacagcaaggactccacctacagcctgagcagcaccctgaccctgagcaaggccgactacgagaagcacaaggtgtacgcctgcgaagtgacccaccagggcctgtccagccccgtgaccaagagcttcaaccggggcgagtgc

SEQ ID NO: 152 - protein, 353 aa, Artificial
  light chain of PD-L1-GIVGPL-IL2 (N-terminal fusion)
APTSSSTKKTQLQLEHLLLDLQMILNGINNYKNPKLTRMLTFKFYMPKKATELKHLQCLEEELKPLEEVLNLAQSKNFHLRPRDLISNINVIVLELKGSETTFMCEYADETATIVEFLNRWITFCQSIISTLTGIVGPLDIQMTQSPSSLSASVGDRVTITCRASQDVSTAVAWYQQKPGKAPKLLIYSASFLYSGVPSRFSGSGSGTDFTLTISSLQPEDFATYYCQQYLYHPATFGQGTKVEIKRTVAAPSVFIFPPSDEQLKSGTASVVCLLNNFYPREAKVQWKVDNALQSGNSQESVTEQDSKDSTYSLSSTLTLSKADYEKHKVYACEVTHQGLSSPVTKSFNRGEC

SEQ ID NO: 153 - DNA, 1863 bp, Artificial
  heavy chain of 9G4-PVGLIG-NanoLuc (C-terminal fusion)
gaagtgatgttggtggagtctgggggaggcttagtgaagcctggagggtccctgaaactctcctgtacagcctctggattcactttcagtacctatgacatgtcttgggttcgccagactccggagaagaggctggagtgggtctcaaccattagtagtagtcgtacttacacctactattcagccagtgtgaaggggcgattcaccatctccagagacaatgccaggaacatcctgtacctgcaaatgagcagtctgaggtctgaggacacggccatgtattactgtgcaagacaattttctcactggggccaagggactctggtcactgtctctgcagcgtccacaaagggcccaagcgtgttcccgctagcccccagcagcaagagcaccagcggcggcacagccgccctgggctgcctggtgaaggactacttccccgagcccgtgaccgtgtcctggaacagcggagccctgacctccggcgtgcacaccttccccgccgtgctgcagagcagcggcctgtacagcctgagcagcgtggtgaccgtgcccagcagcagcctgggcacccagacctacatctgtaacgtgaaccacaagcccagcaacaccaaggtggacaagagagtggagcccaagagctgtgacaagacccacacctgtcccccctgcccagcccccgagctgctgggcggacccagcgtgttcctgttcccccccaagcccaaggacaccctgatgatcagcagaacccccgaggtgacctgtgtggtggtggacgtgtcccacgaggacccagaggtgaagttcaactggtacgtggacggcgtggaggtgcacaacgccaagaccaagcccagagaggagcagtacaacagcacctacagggtggtgtccgtgctgaccgtgctgcaccaggactggctgaacggcaaggagtacaagtgtaaggtgtccaacaaggccctgccagccccaatcgaaaagaccatcagcaaggccaagggccagccaagagagccccaggtgtacaccctgccacccagcagggaggagatgaccaagaaccaggtgtccctgacctgtctggtgaagggcttctacccaagcgacatcgccgtggagtgggagagcaacggccagcccgagaacaactacaagaccacccccccagtgctggacagcgacggcagcttcttcctgtacagcaagctgaccgtggacaagagcagatggcagcagggcaacgtgttcagctgctccgtgatgcacgaggccctgcacaaccactacacccagaagagcctgagcctgtccccaggcccggtgggcctgattggcctcgagatggtcttcacactcgaagatttcgttggggactggcgacagacagccggctacaacctggaccaagtccttgaacagggaggtgtgtccagtttgtttcagaatctcggggtgtccgtaactccgatccaaaggattgtcctgagcggtgaaaatgggctgaagatcgacatccatgtcatcatcccgtatgaaggtctgagcggcgaccaaatgggccagatcgaaaaaatttttaaggtggtgtaccctgtggatgatcatcactttaaggtgatcctgcactatggcacactggtaatcgacggggttacgccgaacatgatcgactatttcggacggccgtatgaaggcatcgccgtgttcgacggcaaaaagatcactgtaacagggaccctgtggaacggcaacaaaattatcgacgagcgcctgatcaaccccgacggctccctgctgttccgagtaaccatcaacggagtgaccggctggcggctgtgcgaacgcattctggcg

SEQ ID NO: 154 - protein, 621 aa, Artificial
  heavy chain of 9G4-PVGLIG-NanoLuc (C-terminal fusion)
EVMLVESGGGLVKPGGSLKLSCTASGFTFSTYDMSWVRQTPEKRLEWVSTISSSRTYTYYSASVKGRFTISRDNARNILYLQMSSLRSEDTAMYYCARQFSHWGQGTLVTVSAASTKGPSVFPLAPSSKSTSGGTAALGCLVKDYFPEPVTVSWNSGALTSGVHTFPAVLQSSGLYSLSSVVTVPSSSLGTQTYICNVNHKPSNTKVDKRVEPKSCDKTHTCPPCPAPELLGGPSVFLFPPKPKDTLMISRTPEVTCVVVDVSHEDPEVKFNWYVDGVEVHNAKTKPREEQYNSTYRVVSVLTVLHQDWLNGKEYKCKVSNKALPAPIEKTISKAKGQPREPQVYTLPPSREEMTKNQVSLTCLVKGFYPSDIAVEWESNGQPENNYKTTPPVLDSDGSFFLYSKLTVDKSRWQQGNVFSCSVMHEALHNHYTQKSLSLSPGPVGLIGLEMVFTLEDFVGDWRQTAGYNLDQVLEQGGVSSLFQNLGVSVTPIQRIVLSGENGLKIDIHVIIPYEGLSGDQMGQIEKIFKVVYPVDDHHFKVILHYGTLVIDGVTPNMIDYFGRPYEGIAVFDGKKITVTGTLWNGNKIIDERLINPDGSLLFRVTINGVTGWRLCERILA

SEQ ID NO: 155 - DNA, 1551 bp, Artificial
  heavy chain of 9G4-PVGLIG-CCL4 (C-terminal fusion)
gaagtgatgttggtggagtctgggggaggcttagtgaagcctggagggtccctgaaactctcctgtacagcctctggattcactttcagtacctatgacatgtcttgggttcgccagactccggagaagaggctggagtgggtctcaaccattagtagtagtcgtacttacacctactattcagccagtgtgaaggggcgattcaccatctccagagacaatgccaggaacatcctgtacctgcaaatgagcagtctgaggtctgaggacacggccatgtattactgtgcaagacaattttctcactggggccaagggactctggtcactgtctctgcagcgtccacaaagggcccaagcgtgttcccgctagcccccagcagcaagagcaccagcggcggcacagccgccctgggctgcctggtgaaggactacttccccgagcccgtgaccgtgtcctggaacagcggagccctgacctccggcgtgcacaccttccccgccgtgctgcagagcagcggcctgtacagcctgagcagcgtggtgaccgtgcccagcagcagcctgggcacccagacctacatctgtaacgtgaaccacaagcccagcaacaccaaggtggacaagagagtggagcccaagagctgtgacaagacccacacctgtcccccctgcccagcccccgagctgctgggcggacccagcgtgttcctgttcccccccaagcccaaggacaccctgatgatcagcagaacccccgaggtgacctgtgtggtggtggacgtgtcccacgaggacccagaggtgaagttcaactggtacgtggacggcgtggaggtgcacaacgccaagaccaagcccagagaggagcagtacaacagcacctacagggtggtgtccgtgctgaccgtgctgcaccaggactggctgaacggcaaggagtacaagtgtaaggtgtccaacaaggccctgccagccccaatcgaaaagaccatcagcaaggccaagggccagccaagagagccccaggtgtacaccctgccacccagcagggaggagatgaccaagaaccaggtgtccctgacctgtctggtgaagggcttctacccaagcgacatcgccgtggagtgggagagcaacggccagcccgagaacaactacaagaccacccccccagtgctggacagcgacggcagcttcttcctgtacagcaagctgaccgtggacaagagcagatggcagcagggcaacgtgttcagctgctccgtgatgcacgaggccctgcacaaccactacacccagaagagcctgagcctgtccccaggcccggtgggcctgattggcgcaccaatgggctcagaccctcccaccgcctgctgcttttcttacaccgcgaggaaacttcctcgcaactttgtggtagattactatgagaccagcagcctctgctcccagccagctgtggtattccaaaccaaaagaagcaagcaagtctgtgctgatcccagtgaatcctgggtccaggagtacgtgtatgacctggaactgaac

SEQ ID NO: 156 - protein, 517 aa, Artificial
  heavy chain of 9G4-PVGLIG-CCL4 (C-terminal fusion)
EVMLVESGGGLVKPGGSLKLSCTASGFTFSTYDMSWVRQTPEKRLEWVSTISSSRTYTYYSASVKGRFTISRDNARNILYLQMSSLRSEDTAMYYCARQFSHWGQGTLVTVSAASTKGPSVFPLAPSSKSTSGGTAALGCLVKDYFPEPVTVSWNSGALTSGVHTFPAVLQSSGLYSLSSVVTVPSSSLGTQTYICNVNHKPSNTKVDKRVEPKSCDKTHTCPPCPAPELLGGPSVFLFPPKPKDTLMISRTPEVTCVVVDVSHEDPEVKFNWYVDGVEVHNAKTKPREEQYNSTYRVVSVLTVLHQDWLNGKEYKCKVSNKALPAPIEKTISKAKGQPREPQVYTLPPSREEMTKNQVSLTCLVKGFYPSDIAVEWESNGQPENNYKTTPPVLDSDGSFFLYSKLTVDKSRWQQGNVFSCSVMHEALHNHYTQKSLSLSPGPVGLIGAPMGSDPPTACCFSYTARKLPRNFVVDYYETSSLCSQPAVVFQTKRSKQVCADPSESWVQEYVYDLELN

SEQ ID NO: 157 - DNA, 1686 bp, Artificial
  heavy chain of 9G4-PVGLIG-IL15 (C-terminal fusion)
gaagtgatgttggtggagtctgggggaggcttagtgaagcctggagggtccctgaaactctcctgtacagcctctggattcactttcagtacctatgacatgtcttgggttcgccagactccggagaagaggctggagtgggtctcaaccattagtagtagtcgtacttacacctactattcagccagtgtgaaggggcgattcaccatctccagagacaatgccaggaacatcctgtacctgcaaatgagcagtctgaggtctgaggacacggccatgtattactgtgcaagacaattttctcactggggccaagggactctggtcactgtctctgcagcgtccacaaagggcccaagcgtgttcccgctagcccccagcagcaagagcaccagcggcggcacagccgccctgggctgcctggtgaaggactacttccccgagcccgtgaccgtgtcctggaacagcggagccctgacctccggcgtgcacaccttccccgccgtgctgcagagcagcggcctgtacagcctgagcagcgtggtgaccgtgcccagcagcagcctgggcacccagacctacatctgtaacgtgaaccacaagcccagcaacaccaaggtggacaagagagtggagcccaagagctgtgacaagacccacacctgtcccccctgcccagcccccgagctgctgggcggacccagcgtgttcctgttcccccccaagcccaaggacaccctgatgatcagcagaacccccgaggtgacctgtgtggtggtggacgtgtcccacgaggacccagaggtgaagttcaactggtacgtggacggcgtggaggtgcacaacgccaagaccaagcccagagaggagcagtacaacagcacctacagggtggtgtccgtgctgaccgtgctgcaccaggactggctgaacggcaaggagtacaagtgtaaggtgtccaacaaggccctgccagccccaatcgaaaagaccatcagcaaggccaagggccagccaagagagccccaggtgtacaccctgccacccagcagggaggagatgaccaagaaccaggtgtccctgacctgtctggtgaagggcttctacccaagcgacatcgccgtggagtgggagagcaacggccagcccgagaacaactacaagaccacccccccagtgctggacagcgacggcagcttcttcctgtacagcaagctgaccgtggacaagagcagatggcagcagggcaacgtgttcagctgctccgtgatgcacgaggccctgcacaaccactacacccagaagagcctgagcctgtccccaggcccggtgggcctgattggcaactgggtgaatgtaataagtgatttgaaaaaaattgaagatcttattcaatctatgcatattgatgctactttatatacggaaagtgatgttcaccccagttgcaaagtaacagcaatgaagtgctttctcttggagttacaagttatttcacttgagtccggagatgcaagtattcatgatacagtagaaaatctgatcatcctagcaaacaacagtttgtcttctaatgggaatgtaacagaatctggatgcaaagaatgtgaggaactggaggaaaaaaatattaaagaatttttgcagagttttgtacatattgtccaaatgttcatcaacacttct

SEQ ID NO: 158 - protein, 562 aa, Artificial
  heavy chain of 9G4-PVGLIG-IL15 (C-terminal fusion)
EVMLVESGGGLVKPGGSLKLSCTASGFTFSTYDMSWVRQTPEKRLEWVSTISSSRTYTYYSASVKGRFTISRDNARNILYLQMSSLRSEDTAMYYCARQFSHWGQGTLVTVSAASTKGPSVFPLAPSSKSTSGGTAALGCLVKDYFPEPVTVSWNSGALTSGVHTFPAVLQSSGLYSLSSVVTVPSSSLGTQTYICNVNHKPSNTKVDKRVEPKSCDKTHTCPPCPAPELLGGPSVFLFPPKPKDTLMISRTPEVTCVVVDVSHEDPEVKFNWYVDGVEVHNAKTKPREEQYNSTYRVVSVLTVLHQDWLNGKEYKCKVSNKALPAPIEKTISKAKGQPREPQVYTLPPSREEMTKNQVSLTCLVKGFYPSDIAVEWESNGQPENNYKTTPPVLDSDGSFFLYSKLTVDKSRWQQGNVFSCSVMHEALHNHYTQKSLSLSPGPVGLIGNWVNVISDLKKIEDLIQSMHIDATLYTESDVHPSCKVTAMKCFLLELQVISLESGDASIHDTVENLIILANNSLSSNGNVTESGCKECEELEEKNIKEFLQSFVHIVQMFINTS

SEQ ID NO: 159 - DNA, 1839 bp, Artificial
  heavy chain of 9G4-PVGLIG-IFNalpha (C-terminal fusion)
gaagtgatgttggtggagtctgggggaggcttagtgaagcctggagggtccctgaaactctcctgtacagcctctggattcactttcagtacctatgacatgtcttgggttcgccagactccggagaagaggctggagtgggtctcaaccattagtagtagtcgtacttacacctactattcagccagtgtgaaggggcgattcaccatctccagagacaatgccaggaacatcctgtacctgcaaatgagcagtctgaggtctgaggacacggccatgtattactgtgcaagacaattttctcactggggccaagggactctggtcactgtctctgcagcgtccacaaagggcccaagcgtgttcccgctagcccccagcagcaagagcaccagcggcggcacagccgccctgggctgcctggtgaaggactacttccccgagcccgtgaccgtgtcctggaacagcggagccctgacctccggcgtgcacaccttccccgccgtgctgcagagcagcggcctgtacagcctgagcagcgtggtgaccgtgcccagcagcagcctgggcacccagacctacatctgtaacgtgaaccacaagcccagcaacaccaaggtggacaagagagtggagcccaagagctgtgacaagacccacacctgtcccccctgcccagcccccgagctgctgggcggacccagcgtgttcctgttcccccccaagcccaaggacaccctgatgatcagcagaacccccgaggtgacctgtgtggtggtggacgtgtcccacgaggacccagaggtgaagttcaactggtacgtggacggcgtggaggtgcacaacgccaagaccaagcccagagaggagcagtacaacagcacctacagggtggtgtccgtgctgaccgtgctgcaccaggactggctgaacggcaaggagtacaagtgtaaggtgtccaacaaggccctgccagccccaatcgaaaagaccatcagcaaggccaagggccagccaagagagccccaggtgtacaccctgccacccagcagggaggagatgaccaagaaccaggtgtccctgacctgtctggtgaagggcttctacccaagcgacatcgccgtggagtgggagagcaacggccagcccgagaacaactacaagaccacccccccagtgctggacagcgacggcagcttcttcctgtacagcaagctgaccgtggacaagagcagatggcagcagggcaacgtgttcagctgctccgtgatgcacgaggccctgcacaaccactacacccagaagagcctgagcctgtccccaggcccggtgggcctgattggctgtgatctgcctcaaacccacagcctgggtagcaggaggaccttgatgctcctggcacagatgaggaaaatctctcttttctcctgcttgaaggacagacatgactttggatttccccaggaggagtttggcaaccagttccaaaaggctgaaaccatccctgtcctccatgagatgatccagcagatcttcaatctcttcagcacaaaggactcatctgctgcttgggatgagaccctcctagacaaattctacactgaactctaccagcagctgaatgacctggaagcctgtgtgatacagggggtgggggtgacagagactcccctgatgaaggaggactccattctggctgtgaggaaatacttccaaagaatcactctctatctgaaagagaagaaatacagcccttgtgcctgggaggttgtcagagcagaaatcatgagatctttttctttgtcaacaaacttgcaagaaagtttaagaagtaaggaa

SEQ ID NO: 160 - protein, 613 aa, Artificial
  heavy chain of 9G4-PVGLIG-IFNalpha (C-terminal fusion)
EVMLVESGGGLVKPGGSLKLSCTASGFTFSTYDMSWVRQTPEKRLEWVSTISSSRTYTYYSASVKGRFTISRDNARNILYLQMSSLRSEDTAMYYCARQFSHWGQGTLVTVSAASTKGPSVFPLAPSSKSTSGGTAALGCLVKDYFPEPVTVSWNSGALTSGVHTFPAVLQSSGLYSLSSVVTVPSSSLGTQTYICNVNHKPSNTKVDKRVEPKSCDKTHTCPPCPAPELLGGPSVFLFPPKPKDTLMISRTPEVTCVVVDVSHEDPEVKFNWYVDGVEVHNAKTKPREEQYNSTYRVVSVLTVLHQDWLNGKEYKCKVSNKALPAPIEKTISKAKGQPREPQVYTLPPSREEMTKNQVSLTCLVKGFYPSDIAVEWESNGQPENNYKTTPPVLDSDGSFFLYSKLTVDKSRWQQGNVFSCSVMHEALHNHYTQKSLSLSPGPVGLIGCDLPQTHSLGSRRTLMLLAQMRKISLFSCLKDRHDFGFPQEEFGNQFQKAETIPVLHEMIQQIFNLFSTKDSSAAWDETLLDKFYTELYQQLNDLEACVIQGVGVTETPLMKEDSILAVRKYFQRITLYLKEKKYSPCAWEVVRAEIMRSFSLSTNLQESLRSKE

SEQ ID NO: 161 - DNA, 1698 bp, Artificial; identical to SEQ ID NO: 51
  heavy chain of NHS76-PVGLIG-IL15 (C-terminal fusion)

SEQ ID NO: 162 - protein, 566 aa, Artificial; identical to SEQ ID NO: 52
  heavy chain of NHS76-PVGLIG-IL15 (C-terminal fusion)

SEQ ID NO: 163 - DNA, 1704 bp, Artificial
  heavy chain of H16/L16-PVGLIG-IL15 (C-terminal fusion)
caggtgcagctgcaggagtcgggcccaggactggtgaagccttcggggaccctgtccctcacctgcgctgtctctggtggctccatcagcagtagtaactggtggagttgggtccgccagcccccagggaaggggctggagtggattggggaaatctatcatagtgggagcaccaactacaacccgtccctcaagagtcgagtcaccatatcagtagacaagtccaagaaccagttctccctgaagctgagctctgtgaccgccgcggacacggccgtgtattactgtgcgagatggaccgggcgtactgatgcttttgatatctggggccaagggacaatggtcaccgtctcaagcgcgtccacaaagggcccaagcgtgttcccgctagcccccagcagcaagagcaccagcggcggcacagccgccctgggctgcctggtgaaggactacttccccgagcccgtgaccgtgtcctggaacagcggagccctgacctccggcgtgcacaccttccccgccgtgctgcagagcagcggcctgtacagcctgagcagcgtggtgaccgtgcccagcagcagcctgggcacccagacctacatctgtaacgtgaaccacaagcccagcaacaccaaggtggacaagagagtggagcccaagagctgtgacaagacccacacctgtcccccctgcccagcccccgagctgctgggcggacccagcgtgttcctgttcccccccaagcccaaggacaccctgatgatcagcagaacccccgaggtgacctgtgtggtggtggacgtgtcccacgaggacccagaggtgaagttcaactggtacgtggacggcgtggaggtgcacaacgccaagaccaagcccagagaggagcagtacaacagcacctacagggtggtgtccgtgctgaccgtgctgcaccaggactggctgaacggcaaggagtacaagtgtaaggtgtccaacaaggccctgccagccccaatcgaaaagaccatcagcaaggccaagggccagccaagagagccccaggtgtacaccctgccacccagcagggaggagatgaccaagaaccaggtgtccctgacctgtctggtgaagggcttctacccaagcgacatcgccgtggagtgggagagcaacggccagcccgagaacaactacaagaccacccccccagtgctggacagcgacggcagcttcttcctgtacagcaagctgaccgtggacaagagcagatggcagcagggcaacgtgttcagctgctccgtgatgcacgaggccctgcacaaccactacacccagaagagcctgagcctgtccccaggcccggtgggcctgattggcaactgggtgaatgtaataagtgatttgaaaaaaattgaagatcttattcaatctatgcatattgatgctactttatatacggaaagtgatgttcaccccagttgcaaagtaacagcaatgaagtgctttctcttggagttacaagttatttcacttgagtccggagatgcaagtattcatgatacagtagaaaatctgatcatcctagcaaacaacagtttgtcttctaatgggaatgtaacagaatctggatgcaaagaatgtgaggaactggaggaaaaaaatattaaagaatttttgcagagttttgtacatattgtccaaatgttcatcaacacttct

SEQ ID NO: 164 - protein, 568 aa, Artificial; identical to SEQ ID NO: 50
  heavy chain of H16/L16-PVGLIG-IL15 (C-terminal fusion)

SEQ ID NO: 165 - DNA, 12 bp, Artificial
  linker
tcaggcagatct

SEQ ID NO: 166 - protein, 4 aa, Artificial
  linker
SGRS

SEQ ID NO: 167 - DNA, 15 bp, Artificial
  linker
tcaggcagatctgcc

SEQ ID NO: 168 - protein, 5 aa, Artificial
  linker
SGRSA

SEQ ID NO: 169 - DNA, 24 bp, Artificial
  linker
ccgagcagccggagaagagtgaac

SEQ ID NO: 170 - protein, 8 aa, Artificial
  linker
PSSRRRVN

SEQ ID NO: 171 - DNA, 447 bp, Homo sapiens
aaacccatcaccggcaccatcaacgacctgaaccagcaagtgtggacactgcagggccagaatctggtggccgtgcctagaagcgatagcgtgacacctgtgaccgtggccgtgatcacatgcaagtaccccgaggctcttgagcaaggcagaggcgatcctatctacctgggcattcagaaccccgagatgtgcctgtactgcgagaaagtgggagagcagcccacactgcagctgaaagaacagaaaatcatggacctgtacggccagcctgagcctgtgaagcccttcctgttttacagagccaagaccggccggaccagcacactggaatctgtggcctttcctgactggtttatcgccagcagcaagcgggaccagcctatcatcctgacaagcgagctgggcaagagctacaacaccgccttcgagctgaacatcaacgat

SEQ ID NO: 172 - protein, 149 aa, Homo sapiens
KPITGTINDLNQQVWTLQGQNLVAVPRSDSVTPVTVAVITCKYPEALEQGRGDPIYLGIQNPEMCLYCEKVGEQPTLQLKEQKIMDLYGQPEPVKPFLFYRAKTGRTSTLESVAFPDWFIASSKRDQPIILTSELGKSYNTAFELNIND

SEQ ID NO: 173 - DNA, 1869 bp, Artificial
  H16/L16-PVGLIG-IL36G heavy chain
atggaaaccgacaccctgctgctgtgggtgctgctgctctgggtcccaggctctaccggccaggtgcagctgcaggagtcgggaccaggactggtgaagccttcggggaccctgtccctcacctgcgctgtctctggtggctccatcagcagtagtaactggtggagttgggtccgccagcccccagggaaggggctggagtggattggggaaatctatcatagtgggagcaccaactacaacccgtccctcaagagtcgagtcaccatatcagtagacaagtccaagaaccagttctccctgaagctgagctctgtgaccgccgcggacacggccgtgtattactgtgcgagatggaccgggcgtactgatgcttttgatatctggggccaagggacaatggtcaccgtctcaagcgcgtccacaaagggcccaagcgtgttcccgctagcccccagcagcaagagcaccagcggcggcacagccgccctgggctgcctggtgaaggactacttccccgagcccgtgaccgtgtcctggaacagcggagccctgacctccggcgtgcacaccttccccgccgtgctgcagagcagcggcctgtacagcctgagcagcgtggtgaccgtgcccagcagcagcctgggcacccagacctacatctgtaacgtgaaccacaagcccagcaacaccaaggtggacaagagagtggagcccaagagctgtgacaagacccacacctgtcccccctgcccagcccccgagctgctgggcggacccagcgtgttcctgttcccccccaagcccaaggacaccctgatgatcagcagaacccccgaggtgacctgtgtggtggtggacgtgtcccacgaggacccagaggtgaagttcaactggtacgtggacggcgtggaggtgcacaacgccaagaccaagcccagagaggagcagtacaacagcacctacagggtggtgtccgtgctgaccgtgctgcaccaggactggctgaacggcaaggagtacaagtgtaaggtgtccaacaaggccctgccagccccaatcgaaaagaccatcagcaaggccaagggccagccaagagagccccaggtgtacaccctgccacccagcagggaggagatgaccaagaaccaggtgtccctgacctgtctggtgaagggcttctacccaagcgacatcgccgtggagtgggagagcaacggccagcccgagaacaactacaagaccacccccccagtgctggacagcgacggcagcttcttcctgtacagcaagctgaccgtggacaagagcagatggcagcagggcaacgtgttcagctgctccgtgatgcacgaggccctgcacaaccactacacccagaagagcctgagcctgtccccaggcccggtgggcctgattggcaaacccatcaccggcaccatcaacgacctgaaccagcaagtgtggacactgcagggccagaatctggtggccgtgcctagaagcgatagcgtgacacctgtgaccgtggccgtgatcacatgcaagtaccccgaggctcttgagcaaggcagaggcgatcctatctacctgggcattcagaaccccgagatgtgcctgtactgcgagaaagtgggagagcagcccacactgcagctgaaagaacagaaaatcatggacctgtacggccagcctgagcctgtgaagcccttcctgttttacagagccaagaccggccggaccagcacactggaatctgtggcctttcctgactggtttatcgccagcagcaagcgggaccagcctatcatcctgacaagcgagctgggcaagagctacaacaccgccttcgagctgaacatcaacgat

SEQ ID NO: 174 - protein, 623 aa, Artificial
  H16/L16-PVGLIG-IL36G heavy chain
METDTLLLWVLLLWVPGSTGQVQLQESGPGLVKPSGTLSLTCAVSGGSISSSNWWSWVRQPPGKGLEWIGEIYHSGSTNYNPSLKSRVTISVDKSKNQFSLKLSSVTAADTAVYYCARWTGRTDAFDIWGQGTMVTVSSASTKGPSVFPLAPSSKSTSGGTAALGCLVKDYFPEPVTVSWNSGALTSGVHTFPAVLQSSGLYSLSSVVTVPSSSLGTQTYICNVNHKPSNTKVDKRVEPKSCDKTHTCPPCPAPELLGGPSVFLFPPKPKDTLMISRTPEVTCVVVDVSHEDPEVKFNWYVDGVEVHNAKTKPREEQYNSTYRVVSVLTVLHQDWLNGKEYKCKVSNKALPAPIEKTISKAKGQPREPQVYTLPPSREEMTKNQVSLTCLVKGFYPSDIAVEWESNGQPENNYKTTPPVLDSDGSFFLYSKLTVDKSRWQQGNVFSCSVMHEALHNHYTQKSLSLSPGPVGLIGKPITGTINDLNQQVWTLQGQNLVAVPRSDSVTPVTVAVITCKYPEALEQGRGDPIYLGIQNPEMCLYCEKVGEQPTLQLKEQKIMDLYGQPEPVKPFLFYRAKTGRTSTLESVAFPDWFIASSKRDQPIILTSELGKSYNTAFELNIND

SEQ ID NO: 175 - DNA, 1626 bp, Artificial
  9G4-SGRS-hCXCL10 heavy chain
atgaacttcggactctccctgatcttccttgttctggtgcttaagggcgtgcagtgcgaagtgatgttggtagaaagcggtggtgggctggtgaaacctggcgggtccctgaaactctcctgtactgctagtggattcacattcagcacttacgacatgtcatgggtccggcagaccccagagaagagactggagtgggtcagcactatctcctcttctcggacctatacgtattacagtgccagcgtcaagggacgctttaccattagcagggataatgccagaaacatactgtacctgcagatgtcaagcctccgaagtgaggacaccgccatgtattactgcgctaggcaattttcacactggggccaggggacattggttaccgtgtctgcagcgtccacaaagggcccaagcgtgttcccgctagcccccagcagcaagagcaccagcggcggcacagccgccctgggctgcctggtgaaggactacttccccgagcccgtgaccgtgtcctggaacagcggagccctgacctccggcgtgcacaccttccccgccgtgctgcagagcagcggcctgtacagcctgagcagcgtggtgaccgtgcccagcagcagcctgggcacccagacctacatctgtaacgtgaaccacaagcccagcaacaccaaggtggacaagagagtggagcccaagagctgtgacaagacccacacctgtcccccctgcccagcccccgagctgctgggcggacccagcgtgttcctgttcccccccaagcccaaggacaccctgatgatcagcagaacccccgaggtgacctgtgtggtggtggacgtgtcccacgaggacccagaggtgaagttcaactggtacgtggacggcgtggaggtgcacaacgccaagaccaagcccagagaggagcagtacaacagcacctacagggtggtgtccgtgctgaccgtgctgcaccaggactggctgaacggcaaggagtacaagtgtaaggtgtccaacaaggccctgccagccccaatcgaaaagaccatcagcaaggccaagggccagccaagagagccccaggtgtacaccctgccacccagcagggaggagatgaccaagaaccaggtgtccctgacctgtctggtgaagggcttctacccaagcgacatcgccgtggagtgggagagcaacggccagcccgagaacaactacaagaccacccccccagtgctggacagcgacggcagcttcttcctgtacagcaagctgaccgtggacaagagcagatggcagcagggcaacgtgttcagctgctccgtgatgcacgaggccctgcacaaccactacacccagaagagcctgagcctgtccccaggctcaggcagatctgtacctctctctagaactgtacgctgtacctgcatcagcattagtaatcaacctgttaatccaaggtctttagaaaaacttgaaattattcctgcaagccaattttgtccacgtgttgagatcattgctacaatgaaaaagaagggtgagaagagatgtctgaatccagaatcgaaggccatcaagaatttactgaaagcagttagcaaggaaaggtctaaaagatctcct

SEQ ID NO: 176 - protein, 542 aa, Artificial
  9G4-SGRS-hCXCL10 heavy chain
MNFGLSLIFLVLVLKGVQCEVMLVESGGGLVKPGGSLKLSCTASGFTFSTYDMSWVRQTPEKRLEWVSTISSSRTYTYYSASVKGRFTISRDNARNILYLQMSSLRSEDTAMYYCARQFSHWGQGTLVTVSAASTKGPSVFPLAPSSKSTSGGTAALGCLVKDYFPEPVTVSWNSGALTSGVHTFPAVLQSSGLYSLSSVVTVPSSSLGTQTYICNVNHKPSNTKVDKRVEPKSCDKTHTCPPCPAPELLGGPSVFLFPPKPKDTLMISRTPEVTCVVVDVSHEDPEVKFNWYVDGVEVHNAKTKPREEQYNSTYRVVSVLTVLHQDWLNGKEYKCKVSNKALPAPIEKTISKAKGQPREPQVYTLPPSREEMTKNQVSLTCLVKGFYPSDIAVEWESNGQPENNYKTTPPVLDSDGSFFLYSKLTVDKSRWQQGNVFSCSVMHEALHNHYTQKSLSLSPGSGRSVPLSRTVRCTCISISNQPVNPRSLEKLEIIPASQFCPRVEIIATMKKKGEKRCLNPESKAIKNLLKAVSKERSKRSP

SEQ ID NO: 177 - DNA, 1641 bp, Artificial
  NHS76-SGRS-hCXCL10 heavy chain
atggaaaccgacaccctgctgctgtgggtgctgctgctctgggtcccaggctctaccggccaggtgcagctgcaggagtccggcccaggactggtgaagccttcggagaccctgtccctcacctgcgctgtctctggttactccatcagcagtggttactactggggctggattcggcagcccccagggaaggggctggagtggattgggagtatctatcatagtgggagcacctactacaacccgtccctcaagagtcgagtcaccatatcagtagacacgtccaagaaccagttctccctgaagctgagctctgtgaccgccgcagacacggccgtgtattactgtgcaagagggaagtggtcgaagtttgactattggggccaaggcaccctggtcaccgtctcttcagcgtccacaaagggcccaagcgtgttcccgctagcccccagcagcaagagcaccagcggcggcacagccgccctgggctgcctggtgaaggactacttccccgagcccgtgaccgtgtcctggaacagcggagccctgacctccggcgtgcacaccttccccgccgtgctgcagagcagcggcctgtacagcctgagcagcgtggtgaccgtgcccagcagcagcctgggcacccagacctacatctgtaacgtgaaccacaagcccagcaacaccaaggtggacaagagagtggagcccaagagctgtgacaagacccacacctgtcccccctgcccagcccccgagctgctgggcggacccagcgtgttcctgttcccccccaagcccaaggacaccctgatgatcagcagaacccccgaggtgacctgtgtggtggtggacgtgtcccacgaggacccagaggtgaagttcaactggtacgtggacggcgtggaggtgcacaacgccaagaccaagcccagagaggagcagtacaacagcacctacagggtggtgtccgtgctgaccgtgctgcaccaggactggctgaacggcaaggagtacaagtgtaaggtgtccaacaaggccctgccagccccaatcgaaaagaccatcagcaaggccaagggccagccaagagagccccaggtgtacaccctgccacccagcagggaggagatgaccaagaaccaggtgtccctgacctgtctggtgaagggcttctacccaagcgacatcgccgtggagtgggagagcaacggccagcccgagaacaactacaagaccacccccccagtgctggacagcgacggcagcttcttcctgtacagcaagctgaccgtggacaagagcagatggcagcagggcaacgtgttcagctgctccgtgatgcacgaggccctgcacaaccactacacccagaagagcctgagcctgtccccaggctcaggcagatctgtacctctctctagaactgtacgctgtacctgcatcagcattagtaatcaacctgttaatccaaggtctttagaaaaacttgaaattattcctgcaagccaattttgtccacgtgttgagatcattgctacaatgaaaaagaagggtgagaagagatgtctgaatccagaatcgaaggccatcaagaatttactgaaagcagttagcaaggaaaggtctaaaagatctcct

SEQ ID NO: 178 - protein, 547 aa, Artificial
  NHS76-SGRS-hCXCL10 heavy chain
METDTLLLWVLLLWVPGSTGQVQLQESGPGLVKPSETLSLTCAVSGYSISSGYYWGWIRQPPGKGLEWIGSIYHSGSTYYNPSLKSRVTISVDTSKNQFSLKLSSVTAADTAVYYCARGKWSKFDYWGQGTLVTVSSASTKGPSVFPLAPSSKSTSGGTAALGCLVKDYFPEPVTVSWNSGALTSGVHTFPAVLQSSGLYSLSSVVTVPSSSLGTQTYICNVNHKPSNTKVDKRVEPKSCDKTHTCPPCPAPELLGGPSVFLFPPKPKDTLMISRTPEVTCVVVDVSHEDPEVKFNWYVDGVEVHNAKTKPREEQYNSTYRVVSVLTVLHQDWLNGKEYKCKVSNKALPAPIEKTISKAKGQPREPQVYTLPPSREEMTKNQVSLTCLVKGFYPSDIAVEWESNGQPENNYKTTPPVLDSDGSFFLYSKLTVDKSRWQQGNVFSCSVMHEALHNHYTQKSLSLSPGSGRSVPLSRTVRCTCISISNQPVNPRSLEKLEIIPASQFCPRVEIIATMKKKGEKRCLNPESKAIKNLLKAVSKERSKRSP

SEQ ID NO: 179 - DNA, 1647 bp, Artificial
  H16L16-SGRS-hCXCL10 heavy chain
atggaaaccgacaccctgctgctgtgggtgctgctgctctgggtcccaggctctaccggccaggtgcagctgcaggagtcgggaccaggactggtgaagccttcggggaccctgtccctcacctgcgctgtctctggtggctccatcagcagtagtaactggtggagttgggtccgccagcccccagggaaggggctggagtggattggggaaatctatcatagtgggagcaccaactacaacccgtccctcaagagtcgagtcaccatatcagtagacaagtccaagaaccagttctccctgaagctgagctctgtgaccgccgcggacacggccgtgtattactgtgcgagatggaccgggcgtactgatgcttttgatatctggggccaagggacaatggtcaccgtctcaagcgcgtccacaaagggcccaagcgtgttcccgctagcccccagcagcaagagcaccagcggcggcacagccgccctgggctgcctggtgaaggactacttccccgagcccgtgaccgtgtcctggaacagcggagccctgacctccggcgtgcacaccttccccgccgtgctgcagagcagcggcctgtacagcctgagcagcgtggtgaccgtgcccagcagcagcctgggcacccagacctacatctgtaacgtgaaccacaagcccagcaacaccaaggtggacaagagagtggagcccaagagctgtgacaagacccacacctgtcccccctgcccagcccccgagctgctgggcggacccagcgtgttcctgttcccccccaagcccaaggacaccctgatgatcagcagaacccccgaggtgacctgtgtggtggtggacgtgtcccacgaggacccagaggtgaagttcaactggtacgtggacggcgtggaggtgcacaacgccaagaccaagcccagagaggagcagtacaacagcacctacagggtggtgtccgtgctgaccgtgctgcaccaggactggctgaacggcaaggagtacaagtgtaaggtgtccaacaaggccctgccagccccaatcgaaaagaccatcagcaaggccaagggccagccaagagagccccaggtgtacaccctgccacccagcagggaggagatgaccaagaaccaggtgtccctgacctgtctggtgaagggcttctacccaagcgacatcgccgtggagtgggagagcaacggccagcccgagaacaactacaagaccacccccccagtgctggacagcgacggcagcttcttcctgtacagcaagctgaccgtggacaagagcagatggcagcagggcaacgtgttcagctgctccgtgatgcacgaggccctgcacaaccactacacccagaagagcctgagcctgtccccaggctcaggcagatctgtacctctctctagaactgtacgctgtacctgcatcagcattagtaatcaacctgttaatccaaggtctttagaaaaacttgaaattattcctgcaagccaattttgtccacgtgttgagatcattgctacaatgaaaaagaagggtgagaagagatgtctgaatccagaatcgaaggccatcaagaatttactgaaagcagttagcaaggaaaggtctaaaagatctcct

SEQ ID NO: 180 - protein, 549 aa, Artificial
  H16L16-SGRS-hCXCL10 heavy chain
METDTLLLWVLLLWVPGSTGQVQLQESGPGLVKPSGTLSLTCAVSGGSISSSNWWSWVRQPPGKGLEWIGEIYHSGSTNYNPSLKSRVTISVDKSKNQFSLKLSSVTAADTAVYYCARWTGRTDAFDIWGQGTMVTVSSASTKGPSVFPLAPSSKSTSGGTAALGCLVKDYFPEPVTVSWNSGALTSGVHTFPAVLQSSGLYSLSSVVTVPSSSLGTQTYICNVNHKPSNTKVDKRVEPKSCDKTHTCPPCPAPELLGGPSVFLFPPKPKDTLMISRTPEVTCVVVDVSHEDPEVKFNWYVDGVEVHNAKTKPREEQYNSTYRVVSVLTVLHQDWLNGKEYKCKVSNKALPAPIEKTISKAKGQPREPQVYTLPPSREEMTKNQVSLTCLVKGFYPSDIAVEWESNGQPENNYKTTPPVLDSDGSFFLYSKLTVDKSRWQQGNVFSCSVMHEALHNHYTQKSLSLSPGSGRSVPLSRTVRCTCISISNQPVNPRSLEKLEIIPASQFCPRVEIIATMKKKGEKRCLNPESKAIKNLLKAVSKERSKRSP

SEQ ID NO: 181 - DNA, 1761 bp, Artificial
  H16L16-SGRSA-hIL15 heavy chain
atggaaaccgacaccctgctgctgtgggtgctgctgctctgggtcccaggctctaccggccaggtgcagctgcaggagtcgggaccaggactggtgaagccttcggggaccctgtccctcacctgcgctgtctctggtggctccatcagcagtagtaactggtggagttgggtccgccagcccccagggaaggggctggagtggattggggaaatctatcatagtgggagcaccaactacaacccgtccctcaagagtcgagtcaccatatcagtagacaagtccaagaaccagttctccctgaagctgagctctgtgaccgccgcggacacggccgtgtattactgtgcgagatggaccgggcgtactgatgcttttgatatctggggccaagggacaatggtcaccgtctcaagcgcgtccacaaagggcccaagcgtgttcccgctagcccccagcagcaagagcaccagcggcggcacagccgccctgggctgcctggtgaaggactacttccccgagcccgtgaccgtgtcctggaacagcggagccctgacctccggcgtgcacaccttccccgccgtgctgcagagcagcggcctgtacagcctgagcagcgtggtgaccgtgcccagcagcagcctgggcacccagacctacatctgtaacgtgaaccacaagcccagcaacaccaaggtggacaagagagtggagcccaagagctgtgacaagacccacacctgtcccccctgcccagcccccgagctgctgggcggacccagcgtgttcctgttcccccccaagcccaaggacaccctgatgatcagcagaacccccgaggtgacctgtgtggtggtggacgtgtcccacgaggacccagaggtgaagttcaactggtacgtggacggcgtggaggtgcacaacgccaagaccaagcccagagaggagcagtacaacagcacctacagggtggtgtccgtgctgaccgtgctgcaccaggactggctgaacggcaaggagtacaagtgtaaggtgtccaacaaggccctgccagccccaatcgaaaagaccatcagcaaggccaagggccagccaagagagccccaggtgtacaccctgccacccagcagggaggagatgaccaagaaccaggtgtccctgacctgtctggtgaagggcttctacccaagcgacatcgccgtggagtgggagagcaacggccagcccgagaacaactacaagaccacccccccagtgctggacagcgacggcagcttcttcctgtacagcaagctgaccgtggacaagagcagatggcagcagggcaacgtgttcagctgctccgtgatgcacgaggccctgcacaaccactacacccagaagagcctgagcctgtccccaggctcaggcagatctgccaactgggtgaatgtaataagtgatttgaaaaaaattgaagatcttattcaatctatgcatattgatgctactttatatacggaaagtgatgttcaccccagttgcaaagtaacagcaatgaagtgctttctcttggagttacaagttatttcacttgagtccggagatgcaagtattcatgatacagtagaaaatctgatcatcctagcaaacaacagtttgtcttctaatgggaatgtaacagaatctggatgcaaagaatgtgaggaactggaggaaaaaaatattaaagaatttttgcagagttttgtacatattgtccaaatgttcatcaacacttct

SEQ ID NO: 182 - protein, 587 aa, Artificial
  H16L16-SGRSA-hIL15 heavy chain
METDTLLLWVLLLWVPGSTGQVQLQESGPGLVKPSGTLSLTCAVSGGSISSSNWWSWVRQPPGKGLEWIGEIYHSGSTNYNPSLKSRVTISVDKSKNQFSLKLSSVTAADTAVYYCARWTGRTDAFDIWGQGTMVTVSSASTKGPSVFPLAPSSKSTSGGTAALGCLVKDYFPEPVTVSWNSGALTSGVHTFPAVLQSSGLYSLSSVVTVPSSSLGTQTYICNVNHKPSNTKVDKRVEPKSCDKTHTCPPCPAPELLGGPSVFLFPPKPKDTLMISRTPEVTCVVVDVSHEDPEVKFNWYVDGVEVHNAKTKPREEQYNSTYRVVSVLTVLHQDWLNGKEYKCKVSNKALPAPIEKTISKAKGQPREPQVYTLPPSREEMTKNQVSLTCLVKGFYPSDIAVEWESNGQPENNYKTTPPVLDSDGSFFLYSKLTVDKSRWQQGNVFSCSVMHEALHNHYTQKSLSLSPGSGRSANWVNVISDLKKIEDLIQSMHIDATLYTESDVHPSCKVTAMKCFLLELQVISLESGDASIHDTVENLIILANNSLSSNGNVTESGCKECEELEEKNIKEFLQSFVHIVQMFINTS

SEQ ID NO: 183 - DNA, 1914 bp, Artificial
  H16L16-SGRSA-hIFNa heavy chain
atggaaaccgacaccctgctgctgtgggtgctgctgctctgggtcccaggctctaccggccaggtgcagctgcaggagtcgggaccaggactggtgaagccttcggggaccctgtccctcacctgcgctgtctctggtggctccatcagcagtagtaactggtggagttgggtccgccagcccccagggaaggggctggagtggattggggaaatctatcatagtgggagcaccaactacaacccgtccctcaagagtcgagtcaccatatcagtagacaagtccaagaaccagttctccctgaagctgagctctgtgaccgccgcggacacggccgtgtattactgtgcgagatggaccgggcgtactgatgcttttgatatctggggccaagggacaatggtcaccgtctcaagcgcgtccacaaagggcccaagcgtgttcccgctagcccccagcagcaagagcaccagcggcggcacagccgccctgggctgcctggtgaaggactacttccccgagcccgtgaccgtgtcctggaacagcggagccctgacctccggcgtgcacaccttccccgccgtgctgcagagcagcggcctgtacagcctgagcagcgtggtgaccgtgcccagcagcagcctgggcacccagacctacatctgtaacgtgaaccacaagcccagcaacaccaaggtggacaagagagtggagcccaagagctgtgacaagacccacacctgtcccccctgcccagcccccgagctgctgggcggacccagcgtgttcctgttcccccccaagcccaaggacaccctgatgatcagcagaacccccgaggtgacctgtgtggtggtggacgtgtcccacgaggacccagaggtgaagttcaactggtacgtggacggcgtggaggtgcacaacgccaagaccaagcccagagaggagcagtacaacagcacctacagggtggtgtccgtgctgaccgtgctgcaccaggactggctgaacggcaaggagtacaagtgtaaggtgtccaacaaggccctgccagccccaatcgaaaagaccatcagcaaggccaagggccagccaagagagccccaggtgtacaccctgccacccagcagggaggagatgaccaagaaccaggtgtccctgacctgtctggtgaagggcttctacccaagcgacatcgccgtggagtgggagagcaacggccagcccgagaacaactacaagaccacccccccagtgctggacagcgacggcagcttcttcctgtacagcaagctgaccgtggacaagagcagatggcagcagggcaacgtgttcagctgctccgtgatgcacgaggccctgcacaaccactacacccagaagagcctgagcctgtccccaggctcaggcagatctgcctgtgatctgcctcaaacccacagcctgggtagcaggaggaccttgatgctcctggcacagatgaggaaaatctctcttttctcctgcttgaaggacagacatgactttggatttccccaggaggagtttggcaaccagttccaaaaggctgaaaccatccctgtcctccatgagatgatccagcagatcttcaatctcttcagcacaaaggactcatctgctgcttgggatgagaccctcctagacaaattctacactgaactctaccagcagctgaatgacctggaagcctgtgtgatacagggggtgggggtgacagagactcccctgatgaaggaggactccattctggctgtgaggaaatacttccaaagaatcactctctatctgaaagagaagaaatacagcccttgtgcctgggaggttgtcagagcagaaatcatgagatctttttctttgtcaacaaacttgcaagaaagtttaagaagtaaggaa

SEQ ID NO: 184 - protein, 638 aa, Artificial
  H16L16-SGRSA-hIFNa heavy chain
METDTLLLWVLLLWVPGSTGQVQLQESGPGLVKPSGTLSLTCAVSGGSISSSNWWSWVRQPPGKGLEWIGEIYHSGSTNYNPSLKSRVTISVDKSKNQFSLKLSSVTAADTAVYYCARWTGRTDAFDIWGQGTMVTVSSASTKGPSVFPLAPSSKSTSGGTAALGCLVKDYFPEPVTVSWNSGALTSGVHTFPAVLQSSGLYSLSSVVTVPSSSLGTQTYICNVNHKPSNTKVDKRVEPKSCDKTHTCPPCPAPELLGGPSVFLFPPKPKDTLMISRTPEVTCVVVDVSHEDPEVKFNWYVDGVEVHNAKTKPREEQYNSTYRVVSVLTVLHQDWLNGKEYKCKVSNKALPAPIEKTISKAKGQPREPQVYTLPPSREEMTKNQVSLTCLVKGFYPSDIAVEWESNGQPENNYKTTPPVLDSDGSFFLYSKLTVDKSRWQQGNVFSCSVMHEALHNHYTQKSLSLSPGSGRSACDLPQTHSLGSRRTLMLLAQMRKISLFSCLKDRHDFGFPQEEFGNQFQKAETIPVLHEMIQQIFNLFSTKDSSAAWDETLLDKFYTELYQQLNDLEACVIQGVGVTETPLMKEDSILAVRKYFQRITLYLKEKKYSPCAWEVVRAEIMRSFSLSTNLQESLRSKE

SEQ ID NO: 185 - DNA, 1923 bp, Artificial
  H16L16-PSSRRRVN-hIFNa heavy chain
atggaaaccgacaccctgctgctgtgggtgctgctgctctgggtcccaggctctaccggccaggtgcagctgcaggagtcgggaccaggactggtgaagccttcggggaccctgtccctcacctgcgctgtctctggtggctccatcagcagtagtaactggtggagttgggtccgccagcccccagggaaggggctggagtggattggggaaatctatcatagtgggagcaccaactacaacccgtccctcaagagtcgagtcaccatatcagtagacaagtccaagaaccagttctccctgaagctgagctctgtgaccgccgcggacacggccgtgtattactgtgcgagatggaccgggcgtactgatgcttttgatatctggggccaagggacaatggtcaccgtctcaagcgcgtccacaaagggcccaagcgtgttcccgctagcccccagcagcaagagcaccagcggcggcacagccgccctgggctgcctggtgaaggactacttccccgagcccgtgaccgtgtcctggaacagcggagccctgacctccggcgtgcacaccttccccgccgtgctgcagagcagcggcctgtacagcctgagcagcgtggtgaccgtgcccagcagcagcctgggcacccagacctacatctgtaacgtgaaccacaagcccagcaacaccaaggtggacaagagagtggagcccaagagctgtgacaagacccacacctgtcccccctgcccagcccccgagctgctgggcggacccagcgtgttcctgttcccccccaagcccaaggacaccctgatgatcagcagaacccccgaggtgacctgtgtggtggtggacgtgtcccacgaggacccagaggtgaagttcaactggtacgtggacggcgtggaggtgcacaacgccaagaccaagcccagagaggagcagtacaacagcacctacagggtggtgtccgtgctgaccgtgctgcaccaggactggctgaacggcaaggagtacaagtgtaaggtgtccaacaaggccctgccagccccaatcgaaaagaccatcagcaaggccaagggccagccaagagagccccaggtgtacaccctgccacccagcagggaggagatgaccaagaaccaggtgtccctgacctgtctggtgaagggcttctacccaagcgacatcgccgtggagtgggagagcaacggccagcccgagaacaactacaagaccacccccccagtgctggacagcgacggcagcttcttcctgtacagcaagctgaccgtggacaagagcagatggcagcagggcaacgtgttcagctgctccgtgatgcacgaggccctgcacaaccactacacccagaagagcctgagcctgtccccaggcccgagcagccggagaagagtgaactgtgatctgcctcaaacccacagcctgggtagcaggaggaccttgatgctcctggcacagatgaggaaaatctctcttttctcctgcttgaaggacagacatgactttggatttccccaggaggagtttggcaaccagttccaaaaggctgaaaccatccctgtcctccatgagatgatccagcagatcttcaatctcttcagcacaaaggactcatctgctgcttgggatgagaccctcctagacaaattctacactgaactctaccagcagctgaatgacctggaagcctgtgtgatacagggggtgggggtgacagagactcccctgatgaaggaggactccattctggctgtgaggaaatacttccaaagaatcactctctatctgaaagagaagaaatacagcccttgtgcctgggaggttgtcagagcagaaatcatgagatctttttctttgtcaacaaacttgcaagaaagtttaagaagtaaggaa

SEQ ID NO: 186 - protein, 641 aa, Artificial
  H16L16-PSSRRRVN-hIFNa heavy chain
METDTLLLWVLLLWVPGSTGQVQLQESGPGLVKPSGTLSLTCAVSGGSISSSNWWSWVRQPPGKGLEWIGEIYHSGSTNYNPSLKSRVTISVDKSKNQFSLKLSSVTAADTAVYYCARWTGRTDAFDIWGQGTMVTVSSASTKGPSVFPLAPSSKSTSGGTAALGCLVKDYFPEPVTVSWNSGALTSGVHTFPAVLQSSGLYSLSSVVTVPSSSLGTQTYICNVNHKPSNTKVDKRVEPKSCDKTHTCPPCPAPELLGGPSVFLFPPKPKDTLMISRTPEVTCVVVDVSHEDPEVKFNWYVDGVEVHNAKTKPREEQYNSTYRVVSVLTVLHQDWLNGKEYKCKVSNKALPAPIEKTISKAKGQPREPQVYTLPPSREEMTKNQVSLTCLVKGFYPSDIAVEWESNGQPENNYKTTPPVLDSDGSFFLYSKLTVDKSRWQQGNVFSCSVMHEALHNHYTQKSLSLSPGPSSRRRVNCDLPQTHSLGSRRTLMLLAQMRKISLFSCLKDRHDFGFPQEEFGNQFQKAETIPVLHEMIQQIFNLFSTKDSSAAWDETLLDKFYTELYQQLNDLEACVIQGVGVTETPLMKEDSILAVRKYFQRITLYLKEKKYSPCAWEVVRAEIMRSFSLSTNLQESLRSKE

SEQ ID NO: 187 - DNA, 657 bp, Artificial
  m9G4 Complete Light Chain
cgtacggtgatgactcaaacccctctgaccctcagcgtgacgatcgggcagcccgctagtattagctgtaagagtagccagtctctcctggattctgatggcaagacttatctgaactggctgttgcagcgacctggtcagtcaccgacacggctcatatatctggtatccaaactcgactccggcgtgccagacagattcaccggatctggctcaggcacagactttacactgaaaatctccagggtcgaggcagaggaccttggggtttactactgctggcagggaacccactttccacatacattcggtggcggaaccaaactggaaatcaagcgtacggtggccgctcccagcgtgttcatcttccccccaagcgacgagcagctgaagagcggcaccgccagcgtggtgtgtctgctgaacaacttctaccccagggaggccaaggtgcagtggaaggtggacaacgccctgcagagcggcaacagccaggagagcgtcaccgagcaggacagcaaggactccacctacagcctgagcagcaccctgaccctgagcaaggccgactacgagaagcacaaggtgtacgcctgtgaggtgacccaccagggcctgtccagccccgtgaccaagagcttcaacaggggcgagtgc

SEQ ID NO: 188 - protein, 219 aa, Artificial
  m9G4 Complete Light Chain
DVVMTQTPLTLSVTIGQPASISCKSSQSLLDSDGKTYLNWLLQRPGQSPTRLIYLVSKLDSGVPDRFTGSGSGTDFTLKISRVEAEDLGVYYCWQGTHFPHTFGGGTKLEIKRTVAAPSVFIFPPSDEQLKSGTASVVCLLNNFYPREAKVQWKVDNALQSGNSQESVTEQDSKDSTYSLSSTLTLSKADYEKHKVYACEVTHQGLSSPVTKSFNRGEC

SEQ ID NO: 189 - DNA, 1344 bp, Artificial
  Ganitumab_IgG1 Complete Heavy Chain
caggtgcagctgcaggagtcgggaccaggactggtgaagccttcggggaccctgtccctcacctgcgctgtctctggtggctccatcagcagtagtaactggtggagttgggtccgccagcccccagggaaggggctggagtggattggggaaatctatcatagtgggagcaccaactacaacccgtccctcaagagtcgagtcaccatatcagtagacaagtccaagaaccagttctccctgaagctgagctctgtgaccgccgcggacacggccgtgtattactgtgcgagatggaccgggcgtactgatgcttttgatatctggggccaagggacaatggtcaccgtctcaagcgcgtccacaaagggcccaagcgtgttcccgctagcccccagcagcaagagcaccagcggcggcacagccgccctgggctgcctggtgaaggactacttccccgagcccgtgaccgtgtcctggaacagcggagccctgacctccggcgtgcacaccttccccgccgtgctgcagagcagcggcctgtacagcctgagcagcgtggtgaccgtgcccagcagcagcctgggcacccagacctacatctgtaacgtgaaccacaagcccagcaacaccaaggtggacaagagagtggagcccaagagctgtgacaagacccacacctgtcccccctgcccagcccccgagctgctgggcggacccagcgtgttcctgttcccccccaagcccaaggacaccctgatgatcagcagaacccccgaggtgacctgtgtggtggtggacgtgtcccacgaggacccagaggtgaagttcaactggtacgtggacggcgtggaggtgcacaacgccaagaccaagcccagagaggagcagtacaacagcacctacagggtggtgtccgtgctgaccgtgctgcaccaggactggctgaacggcaaggagtacaagtgtaaggtgtccaacaaggccctgccagccccaatcgaaaagaccatcagcaaggccaagggccagccaagagagccccaggtgtacaccctgccacccagcagggaggagatgaccaagaaccaggtgtccctgacctgtctggtgaagggcttctacccaagcgacatcgccgtggagtgggagagcaacggccagcccgagaacaactacaagaccacccccccagtgctggacagcgacggcagcttcttcctgtacagcaagctgaccgtggacaagagcagatggcagcagggcaacgtgttcagctgctccgtgatgcacgaggccctgcacaaccactacacccagaagagcctgagcctgtccccaggc

SEQ ID NO: 190 - protein, 448 aa, Artificial
  Ganitumab_IgG1 Complete Heavy Chain
QVQLQESGPGLVKPSGTLSLTCAVSGGSISSSNWWSWVRQPPGKGLEWIGEIYHSGSTNYNPSLKSRVTISVDKSKNQFSLKLSSVTAADTAVYYCARWTGRTDAFDIWGQGTMVTVSSASTKGPSVFPLAPSSKSTSGGTAALGCLVKDYFPEPVTVSWNSGALTSGVHTFPAVLQSSGLYSLSSVVTVPSSSLGTQTYICNVNHKPSNTKVDKRVEPKSCDKTHTCPPCPAPELLGGPSVFLFPPKPKDTLMISRTPEVTCVVVDVSHEDPEVKFNWYVDGVEVHNAKTKPREEQYNSTYRVVSVLTVLHQDWLNGKEYKCKVSNKALPAPIEKTISKAKGQPREPQVYTLPPSREEMTKNQVSLTCLVKGFYPSDIAVEWESNGQPENNYKTTPPVLDSDGSFFLYSKLTVDKSRWQQGNVFSCSVMHEALHNHYTQKSLSLSPG

SEQ ID NO: 191 - DNA, 1335 bp, Artificial
  Ganitumab_IgG4 Complete Heavy Chain
caggtgcagctgcaggagtcgggaccaggactggtgaagccttcggggaccctgtccctcacctgcgctgtctctggtggctccatcagcagtagtaactggtggagttgggtccgccagcccccagggaaggggctggagtggattggggaaatctatcatagtgggagcaccaactacaacccgtccctcaagagtcgagtcaccatatcagtagacaagtccaagaaccagttctccctgaagctgagctctgtgaccgccgcggacacggccgtgtattactgtgcgagatggaccgggcgtactgatgcttttgatatctggggccaagggacaatggtcaccgtctcaagcgcgtccacaaagggccccagcgtgttccctctggccccctgcagcagaagcaccagcgagtctacagccgccctgggatgcctggtcaaggactacttccccgagcccgtgaccgtgtcctggaactctggcgccctgaccagcggcgtgcacacctttccagccgtgctgcagagcagcggcctgtacagcctgagcagcgtcgtgaccgtgcctagcagcagcctgggcaccaagacctacacctgtaacgtggaccacaagcccagcaacaccaaggtggacaagcgggtggaatctaagtacggccctccctgccccccctgcccagcccctgaatttctgggcggaccctccgtgttcctgttccccccaaagcccaaggacaccctgatgatcagccggacccccgaagtgacctgcgtggtggtggacgtgtcccaggaagatcccgaggtccagttcaactggtacgtggacggcgtggaagtgcacaacgccaagaccaagcccagagaggaacagttcaacagcacctaccgggtggtgtccgtgctgaccgtgctgcaccaggactggctgaacggcaaagagtacaagtgcaaggtctccaacaagggcctgcccagctccatcgagaaaaccatcagcaaggccaagggccagccccgcgagccccaggtgtacacactgccccccagccaggaagagatgaccaagaaccaggtgtccctgacctgcctcgtgaagggcttctaccccagcgatatcgccgtggaatgggagagcaacggccagcccgagaacaactacaagaccaccccccctgtgctggacagcgacggcagcttcttcctgtactcccggctgaccgtcgacaagagccggtggcaggaaggcaacgtcttcagctgcagcgtgatgcacgaggccctgcacaaccactacacccagaagtccctgagcctgagcctggga

SEQ ID NO: 192 - protein, 445 aa, Artificial
  Ganitumab_IgG4 Complete Heavy Chain
QVQLQESGPGLVKPSGTLSLTCAVSGGSISSSNWWSWVRQPPGKGLEWIGEIYHSGSTNYNPSLKSRVTISVDKSKNQFSLKLSSVTAADTAVYYCARWTGRTDAFDIWGQGTMVTVSSASTKGPSVFPLAPCSRSTSESTAALGCLVKDYFPEPVTVSWNSGALTSGVHTFPAVLQSSGLYSLSSVVTVPSSSLGTKTYTCNVDHKPSNTKVDKRVESKYGPPCPPCPAPEFLGGPSVFLFPPKPKDTLMISRTPEVTCVVVDVSQEDPEVQFNWYVDGVEVHNAKTKPREEQFNSTYRVVSVLTVLHQDWLNGKEYKCKVSNKGLPSSIEKTISKAKGQPREPQVYTLPPSQEEMTKNQVSLTCLVKGFYPSDIAVEWESNGQPENNYKTTPPVLDSDGSFFLYSRLTVDKSRWQEGNVFSCSVMHEALHNHYTQKSLSLSLG

SEQ ID NO: 193 - DNA, 1326 bp, Artificial
  m9G4_IgG1 Complete Heavy Chain
gaagtgatgttggtagaaagcggtggtgggctggtgaaacctggcgggtccctgaaactctcctgtactgctagtggattcacattcagcacttacgacatgtcatgggtccggcagaccccagagaagagactggagtgggtcagcactatctcctcttctcggacctatacgtattacagtgccagcgtcaagggacgctttaccattagcagggataatgccagaaacatactgtacctgcagatgtcaagcctccgaagtgaggacaccgccatgtattactgcgctaggcaattttcacactggggccaggggacattggttaccgtgtctgcagcgtccacaaagggcccaagcgtgttcccgctagcccccagcagcaagagcaccagcggcggcacagccgccctgggctgcctggtgaaggactacttccccgagcccgtgaccgtgtcctggaacagcggagccctgacctccggcgtgcacaccttccccgccgtgctgcagagcagcggcctgtacagcctgagcagcgtggtgaccgtgcccagcagcagcctgggcacccagacctacatctgtaacgtgaaccacaagcccagcaacaccaaggtggacaagagagtggagcccaagagctgtgacaagacccacacctgtcccccctgcccagcccccgagctgctgggcggacccagcgtgttcctgttcccccccaagcccaaggacaccctgatgatcagcagaacccccgaggtgacctgtgtggtggtggacgtgtcccacgaggacccagaggtgaagttcaactggtacgtggacggcgtggaggtgcacaacgccaagaccaagcccagagaggagcagtacaacagcacctacagggtggtgtccgtgctgaccgtgctgcaccaggactggctgaacggcaaggagtacaagtgtaaggtgtccaacaaggccctgccagccccaatcgaaaagaccatcagcaaggccaagggccagccaagagagccccaggtgtacaccctgccacccagcagggaggagatgaccaagaaccaggtgtccctgacctgtctggtgaagggcttctacccaagcgacatcgccgtggagtgggagagcaacggccagcccgagaacaactacaagaccacccccccagtgctggacagcgacggcagcttcttcctgtacagcaagctgaccgtggacaagagcagatggcagcagggcaacgtgttcagctgctccgtgatgcacgaggccctgcacaaccactacacccagaagagcctgagcctgtccccaggc

SEQ ID NO: 194 - protein, 442 aa, Artificial
  m9G4_IgG1 Complete Heavy Chain
EVMLVESGGGLVKPGGSLKLSCTASGFTFSTYDMSWVRQTPEKRLEWVSTISSSRTYTYYSASVKGRFTISRDNARNILYLQMSSLRSEDTAMYYCARQFSHWGQGTLVTVSAASTKGPSVFPLAPSSKSTSGGTAALGCLVKDYFPEPVTVSWNSGALTSGVHTFPAVLQSSGLYSLSSVVTVPSSSLGTQTYICNVNHKPSNTKVDKRVEPKSCDKTHTCPPCPAPELLGGPSVFLFPPKPKDTLMISRTPEVTCVVVDVSHEDPEVKFNWYVDGVEVHNAKTKPREEQYNSTYRVVSVLTVLHQDWLNGKEYKCKVSNKALPAPIEKTISKAKGQPREPQVYTLPPSREEMTKNQVSLTCLVKGFYPSDIAVEWESNGQPENNYKTTPPVLDSDGSFFLYSKLTVDKSRWQQGNVFSCSVMHEALHNHYTQKSLSLSPG

SEQ ID NO: 195 - DNA, 1317 bp, Artificial
  m9G4_IgG4 Complete Heavy Chain
gaagtgatgttggtagaaagcggtggtgggctggtgaaacctggcgggtccctgaaactctcctgtactgctagtggattcacattcagcacttacgacatgtcatgggtccggcagaccccagagaagagactggagtgggtcagcactatctcctcttctcggacctatacgtattacagtgccagcgtcaagggacgctttaccattagcagggataatgccagaaacatactgtacctgcagatgtcaagcctccgaagtgaggacaccgccatgtattactgcgctaggcaattttcacactggggccaggggacattggttaccgtgtctgcagcgtccacaaagggccccagcgtgttccctctggccccctgcagcagaagcaccagcgagtctacagccgccctgggatgcctggtcaaggactacttccccgagcccgtgaccgtgtcctggaactctggcgccctgaccagcggcgtgcacacctttccagccgtgctgcagagcagcggcctgtacagcctgagcagcgtcgtgaccgtgcctagcagcagcctgggcaccaagacctacacctgtaacgtggaccacaagcccagcaacaccaaggtggacaagcgggtggaatctaagtacggccctccctgccccccctgcccagcccctgaatttctgggcggaccctccgtgttcctgttccccccaaagcccaaggacaccctgatgatcagccggacccccgaagtgacctgcgtggtggtggacgtgtcccaggaagatcccgaggtccagttcaactggtacgtggacggcgtggaagtgcacaacgccaagaccaagcccagagaggaacagttcaacagcacctaccgggtggtgtccgtgctgaccgtgctgcaccaggactggctgaacggcaaagagtacaagtgcaaggtctccaacaagggcctgcccagctccatcgagaaaaccatcagcaaggccaagggccagccccgcgagccccaggtgtacacactgccccccagccaggaagagatgaccaagaaccaggtgtccctgacctgcctcgtgaagggcttctaccccagcgatatcgccgtggaatgggagagcaacggccagcccgagaacaactacaagaccaccccccctgtgctggacagcgacggcagcttcttcctgtactcccggctgaccgtcgacaagagccggtggcaggaaggcaacgtcttcagctgcagcgtgatgcacgaggccctgcacaaccactacacccagaagtccctgagcctgagcctggga

SEQ ID NO: 196 - protein, 439 aa, Artificial
  m9G4_IgG4 Complete Heavy Chain
EVMLVESGGGLVKPGGSLKLSCTASGFTFSTYDMSWVRQTPEKRLEWVSTISSSRTYTYYSASVKGRFTISRDNARNILYLQMSSLRSEDTAMYYCARQFSHWGQGTLVTVSAASTKGPSVFPLAPCSRSTSESTAALGCLVKDYFPEPVTVSWNSGALTSGVHTFPAVLQSSGLYSLSSVVTVPSSSLGTKTYTCNVDHKPSNTKVDKRVESKYGPPCPPCPAPEFLGGPSVFLFPPKPKDTLMISRTPEVTCVVVDVSQEDPEVQFNWYVDGVEVHNAKTKPREEQFNSTYRVVSVLTVLHQDWLNGKEYKCKVSNKGLPSSIEKTISKAKGQPREPQVYTLPPSQEEMTKNQVSLTCLVKGFYPSDIAVEWESNGQPENNYKTTPPVLDSDGSFFLYSRLTVDKSRWQEGNVFSCSVMHEALHNHYTQKSLSLSLG

SEQ ID NO: 197 - DNA, 1338 bp, Artificial
  hNHS76_IgG1 Complete Heavy Chain
caggtgcagctgcaggagtccggcccaggactggtgaagccttcggagaccctgtccctcacctgcgctgtctctggttactccatcagcagtggttactactggggctggattcggcagcccccagggaaggggctggagtggattgggagtatctatcatagtgggagcacctactacaacccgtccctcaagagtcgagtcaccatatcagtagacacgtccaagaaccagttctccctgaagctgagctctgtgaccgccgcagacacggccgtgtattactgtgcaagagggaagtggtcgaagtttgactattggggccaaggcaccctggtcaccgtctcttcagcgtccacaaagggcccaagcgtgttcccgctagcccccagcagcaagagcaccagcggcggcacagccgccctgggctgcctggtgaaggactacttccccgagcccgtgaccgtgtcctggaacagcggagccctgacctccggcgtgcacaccttccccgccgtgctgcagagcagcggcctgtacagcctgagcagcgtggtgaccgtgcccagcagcagcctgggcacccagacctacatctgtaacgtgaaccacaagcccagcaacaccaaggtggacaagagagtggagcccaagagctgtgacaagacccacacctgtcccccctgcccagcccccgagctgctgggcggacccagcgtgttcctgttcccccccaagcccaaggacaccctgatgatcagcagaacccccgaggtgacctgtgtggtggtggacgtgtcccacgaggacccagaggtgaagttcaactggtacgtggacggcgtggaggtgcacaacgccaagaccaagcccagagaggagcagtacaacagcacctacagggtggtgtccgtgctgaccgtgctgcaccaggactggctgaacggcaaggagtacaagtgtaaggtgtccaacaaggccctgccagccccaatcgaaaagaccatcagcaaggccaagggccagccaagagagccccaggtgtacaccctgccacccagcagggaggagatgaccaagaaccaggtgtccctgacctgtctggtgaagggcttctacccaagcgacatcgccgtggagtgggagagcaacggccagcccgagaacaactacaagaccacccccccagtgctggacagcgacggcagcttcttcctgtacagcaagctgaccgtggacaagagcagatggcagcagggcaacgtgttcagctgctccgtgatgcacgaggccctgcacaaccactacacccagaagagcctgagcctgtccccaggc

SEQ ID NO: 198 - protein, 446 aa, Artificial
  hNHS76_IgG1 Complete Heavy Chain
QVQLQESGPGLVKPSETLSLTCAVSGYSISSGYYWGWIRQPPGKGLEWIGSIYHSGSTYYNPSLKSRVTISVDTSKNQFSLKLSSVTAADTAVYYCARGKWSKFDYWGQGTLVTVSSASTKGPSVFPLAPSSKSTSGGTAALGCLVKDYFPEPVTVSWNSGALTSGVHTFPAVLQSSGLYSLSSVVTVPSSSLGTQTYICNVNHKPSNTKVDKRVEPKSCDKTHTCPPCPAPELLGGPSVFLFPPKPKDTLMISRTPEVTCVVVDVSHEDPEVKFNWYVDGVEVHNAKTKPREEQYNSTYRVVSVLTVLHQDWLNGKEYKCKVSNKALPAPIEKTISKAKGQPREPQVYTLPPSREEMTKNQVSLTCLVKGFYPSDIAVEWESNGQPENNYKTTPPVLDSDGSFFLYSKLTVDKSRWQQGNVFSCSVMHEALHNHYTQKSLSLSPG

SEQ ID NO: 199 - DNA, 1211 bp, Artificial
  hNHS76_IgG4 Complete Heavy Chain
caggtgcagctgcaggagtccggcccaggactggtgaagccttcggagaccctgtccctcacctgcgctgtctctggttactccatcagcagtggttactactggggctggattcggcagcccccagggaaggggctggagtggattgggagtatctatcatagtgggagcacctactacaacccgtccctcaagagtcgagtcaccatatcagtagacacgtccaagaaccagttctccctgaagctgagctctgtgaccgccgcagacacggccgtgtattactgtgcaagagggaagtggtcgaagtttgactattggggccaaggcaccctggtcaccgtctcttcagcgtccacaaagggccccagcgtgttccctctggccccctgcagcagaagcaccagcgagtctacagccgccctgggatgcctggtcaaggactacttccccgagcccgtgaccgtgtcctggaactctggcgccctgaccagcggcgtgcacacctttccagccgtgctgcagagcagcggcctgtacagcctgagcagcgtcgtgaccgtgcctagcagcagcctgggcaccaagacctacacctgtaacgtggaccacaagcccagcaacaccaaggtggacaagcgggtggaatctaagtacggccctccctgccccccctgcccagcccctgaatttctgggcggaccctccgtgttcctgttccccccaaagcccaaggacaccctgatgatcagccggacccccgaagtgacctgcgtggtggtggacgtgtcccaggaagatcccgaggtccagttcaactggtacgtggacggcgtggaagtgcacaacgccaagaccaagcccagagaggaacagttcaacagcacctaccgggtggtgtccgtgctgaccgtgctgcaccaggactggctgaacggcaaagagtacaagtgcaaggtctccaacaagggcctgcccagctccatcgagaaaaccatcagcaaggccaagggccagccccgcgagccccaggtgtacacactgccccccagccaggaagagatgaccaagaaccaggtgtccctgacctgcctcgtgaagggcttctaccccagcgatatcgccgtggaatgggagagcaacggccagcccgagaacaactacaagaccaccccccctgtgctggacagcgacggcagcttcttcctgta

SEQ ID NO: 200 - protein, 442 aa, Artificial; identical to SEQ ID NO: 194
  hNHS76_IgG4 Complete Heavy Chain

SEQ ID NO: 201 - DNA, 36 bp, Artificial
  linker
cctgtcggactcatcggaccggtgggcctgattggc

SEQ ID NO: 202 - protein, 12 aa, Artificial
  linker
PVGLIGPVGLIG

SEQ ID NO: 203 - DNA, 90 bp, Artificial
  linker
ggaggcggaggatctggtggtggtggatctggcggcggaggaagtggcggaggcggaagcggtggtggcggttcaggtggcggagctagc

SEQ ID NO: 204 - protein, 30 aa, Artificial
  linker
GGGGSGGGGSGGGGSGGGGSGGGGSGGGAS

SEQ ID NO: 205 - DNA, 195 bp, Homo sapiens
atcacctgtcctccacctatgagcgtggaacacgccgacatctgggtcaagagctacagcctgtacagcagagagcggtacatctgcaacagcggcttcaagagaaaggccggcacaagcagcctgaccgagtgtgtgctgaacaaggccacaaacgtggcccactggaccacacctagcctgaagtgcatcaga

SEQ ID NO: 206 - protein, 65 aa, Homo sapiens
ITCPPPMSVEHADIWVKSYSLYSRERYICNSGFKRKAGTSSLTECVLNKATNVAHWTTPSLKCIR

SEQ ID NO: 207 - DNA, 231 bp, Homo sapiens
atcacctgtcctccacctatgagcgtggaacacgccgacatctgggtcaagagctacagcctgtacagcagagagcggtacatctgcaacagcggcttcaagagaaaggccggcacaagcagcctgaccgagtgtgtgctgaacaaggccacaaacgtggcccactggaccacacctagcctgaagtgcatcagagaccccgccctggtgcaccagcggcccgcccccccc

SEQ ID NO: 208 - protein, 77 aa, Homo sapiens
ITCPPPMSVEHADIWVKSYSLYSRERYICNSGFKRKAGTSSLTECVLNKATNVAHWTTPSLKCIRDPALVHQRPAPP

SEQ ID NO: 209 - DNA, 525 bp, Homo sapiens
atcacctgtcctccacctatgagcgtggaacacgccgacatctgggtcaagagctacagcctgtacagcagagagcggtacatctgcaacagcggcttcaagagaaaggccggcacaagcagcctgaccgagtgtgtgctgaacaaggccacaaacgtggcccactggaccacacctagcctgaagtgcatcagagatcccgctctggtccatcagaggcctgctcctccatctacagtgacaacagctggcgtgacccctcagcctgagtctctgtctccatctggaaaagagcctgccgccagctctcccagctctaacaatactgctgccaccacagccgccatcgtgcctggatctcagctgatgcctagcaagagccctagcaccggcacaacagagatcagctctcacgagtctagccacggcaccccatctcagaccacagccaagaattgggaactgaccgcctctgcctctcatcagccacctggtgtttaccctcaaggccactctgataccacc

SEQ ID NO: 210 - protein, 175 aa, Homo sapiens
ITCPPPMSVEHADIWVKSYSLYSRERYICNSGFKRKAGTSSLTECVLNKATNVAHWTTPSLKCIRDPALVHQRPAPPSTVTTAGVTPQPESLSPSGKEPAASSPSSNNTAATTAAIVPGSQLMPSKSPSTGTTEISSHESSHGTPSQTTAKNWELTASASHQPPGVYPQGHSDTT

SEQ ID NO: 211 - DNA, 1695 bp, Artificial
  Ganitumab_IgG4_Heavy Chain_PVGLIG_IL15
caggtgcagctgcaggagtcgggaccaggactggtgaagccttcggggaccctgtccctcacctgcgctgtctctggtggctccatcagcagtagtaactggtggagttgggtccgccagcccccagggaaggggctggagtggattggggaaatctatcatagtgggagcaccaactacaacccgtccctcaagagtcgagtcaccatatcagtagacaagtccaagaaccagttctccctgaagctgagctctgtgaccgccgcggacacggccgtgtattactgtgcgagatggaccgggcgtactgatgcttttgatatctggggccaagggacaatggtcaccgtctcaagcgcgtccacaaagggccccagcgtgttccctctggccccctgcagcagaagcaccagcgagtctacagccgccctgggatgcctggtcaaggactacttccccgagcccgtgaccgtgtcctggaactctggcgccctgaccagcggcgtgcacacctttccagccgtgctgcagagcagcggcctgtacagcctgagcagcgtcgtgaccgtgcctagcagcagcctgggcaccaagacctacacctgtaacgtggaccacaagcccagcaacaccaaggtggacaagcgggtggaatctaagtacggccctccctgccccccctgcccagcccctgaatttctgggcggaccctccgtgttcctgttccccccaaagcccaaggacaccctgatgatcagccggacccccgaagtgacctgcgtggtggtggacgtgtcccaggaagatcccgaggtccagttcaactggtacgtggacggcgtggaagtgcacaacgccaagaccaagcccagagaggaacagttcaacagcacctaccgggtggtgtccgtgctgaccgtgctgcaccaggactggctgaacggcaaagagtacaagtgcaaggtctccaacaagggcctgcccagctccatcgagaaaaccatcagcaaggccaagggccagccccgcgagccccaggtgtacacactgccccccagccaggaagagatgaccaagaaccaggtgtccctgacctgcctcgtgaagggcttctaccccagcgatatcgccgtggaatgggagagcaacggccagcccgagaacaactacaagaccaccccccctgtgctggacagcgacggcagcttcttcctgtactcccggctgaccgtcgacaagagccggtggcaggaaggcaacgtcttcagctgcagcgtgatgcacgaggccctgcacaaccactacacccagaagtccctgagcctgagcctgggaccggtgggcctgattggcaactgggtgaatgtaataagtgatttgaaaaaaattgaagatcttattcaatctatgcatattgatgctactttatatacggaaagtgatgttcaccccagttgcaaagtaacagcaatgaagtgctttctcttggagttacaagttatttcacttgagtccggagatgcaagtattcatgatacagtagaaaatctgatcatcctagcaaacaacagtttgtcttctaatgggaatgtaacagaatctggatgcaaagaatgtgaggaactggaggaaaaaaatattaaagaatttttgcagagttttgtacatattgtccaaatgttcatcaacacttct

SEQ ID NO: 212 - protein, 565 aa, Artificial
  Ganitumab_IgG4_Heavy Chain_PVGLIG_IL15
QVQLQESGPGLVKPSGTLSLTCAVSGGSISSSNWWSWVRQPPGKGLEWIGEIYHSGSTNYNPSLKSRVTISVDKSKNQFSLKLSSVTAADTAVYYCARWTGRTDAFDIWGQGTMVTVSSASTKGPSVFPLAPCSRSTSESTAALGCLVKDYFPEPVTVSWNSGALTSGVHTFPAVLQSSGLYSLSSVVTVPSSSLGTKTYTCNVDHKPSNTKVDKRVESKYGPPCPPCPAPEFLGGPSVFLFPPKPKDTLMISRTPEVTCVVVDVSQEDPEVQFNWYVDGVEVHNAKTKPREEQFNSTYRVVSVLTVLHQDWLNGKEYKCKVSNKGLPSSIEKTISKAKGQPREPQVYTLPPSQEEMTKNQVSLTCLVKGFYPSDIAVEWESNGQPENNYKTTPPVLDSDGSFFLYSRLTVDKSRWQEGNVFSCSVMHEALHNHYTQKSLSLSLGPVGLIGNWVNVISDLKKIEDLIQSMHIDATLYTESDVHPSCKVTAMKCFLLELQVISLESGDASIHDTVENLIILANNSLSSNGNVTESGCKECEELEEKNIKEFLQSFVHIVQMFINTS

SEQ ID NO: 213 - DNA, 1677 bp, Artificial
  m9G4_IgG4_Heavy Chain_PVGLIG_IL15
gaagtgatgttggtagaaagcggtggtgggctggtgaaacctggcgggtccctgaaactctcctgtactgctagtggattcacattcagcacttacgacatgtcatgggtccggcagaccccagagaagagactggagtgggtcagcactatctcctcttctcggacctatacgtattacagtgccagcgtcaagggacgctttaccattagcagggataatgccagaaacatactgtacctgcagatgtcaagcctccgaagtgaggacaccgccatgtattactgcgctaggcaattttcacactggggccaggggacattggttaccgtgtctgcagcgtccacaaagggccccagcgtgttccctctggccccctgcagcagaagcaccagcgagtctacagccgccctgggatgcctggtcaaggactacttccccgagcccgtgaccgtgtcctggaactctggcgccctgaccagcggcgtgcacacctttccagccgtgctgcagagcagcggcctgtacagcctgagcagcgtcgtgaccgtgcctagcagcagcctgggcaccaagacctacacctgtaacgtggaccacaagcccagcaacaccaaggtggacaagcgggtggaatctaagtacggccctccctgccccccctgcccagcccctgaatttctgggcggaccctccgtgttcctgttccccccaaagcccaaggacaccctgatgatcagccggacccccgaagtgacctgcgtggtggtggacgtgtcccaggaagatcccgaggtccagttcaactggtacgtggacggcgtggaagtgcacaacgccaagaccaagcccagagaggaacagttcaacagcacctaccgggtggtgtccgtgctgaccgtgctgcaccaggactggctgaacggcaaagagtacaagtgcaaggtctccaacaagggcctgcccagctccatcgagaaaaccatcagcaaggccaagggccagccccgcgagccccaggtgtacacactgccccccagccaggaagagatgaccaagaaccaggtgtccctgacctgcctcgtgaagggcttctaccccagcgatatcgccgtggaatgggagagcaacggccagcccgagaacaactacaagaccaccccccctgtgctggacagcgacggcagcttcttcctgtactcccggctgaccgtcgacaagagccggtggcaggaaggcaacgtcttcagctgcagcgtgatgcacgaggccctgcacaaccactacacccagaagtccctgagcctgagcctgggaccggtgggcctgattggcaactgggtgaatgtaataagtgatttgaaaaaaattgaagatcttattcaatctatgcatattgatgctactttatatacggaaagtgatgttcaccccagttgcaaagtaacagcaatgaagtgctttctcttggagttacaagttatttcacttgagtccggagatgcaagtattcatgatacagtagaaaatctgatcatcctagcaaacaacagtttgtcttctaatgggaatgtaacagaatctggatgcaaagaatgtgaggaactggaggaaaaaaatattaaagaatttttgcagagttttgtacatattgtccaaatgttcatcaacacttct

SEQ ID NO: 214 - protein, 559 aa, Artificial
  m9G4_IgG4_Heavy Chain_PVGLIG_IL15
EVMLVESGGGLVKPGGSLKLSCTASGFTFSTYDMSWVRQTPEKRLEWVSTISSSRTYTYYSASVKGRFTISRDNARNILYLQMSSLRSEDTAMYYCARQFSHWGQGTLVTVSAASTKGPSVFPLAPCSRSTSESTAALGCLVKDYFPEPVTVSWNSGALTSGVHTFPAVLQSSGLYSLSSVVTVPSSSLGTKTYTCNVDHKPSNTKVDKRVESKYGPPCPPCPAPEFLGGPSVFLFPPKPKDTLMISRTPEVTCVVVDVSQEDPEVQFNWYVDGVEVHNAKTKPREEQFNSTYRVVSVLTVLHQDWLNGKEYKCKVSNKGLPSSIEKTISKAKGQPREPQVYTLPPSQEEMTKNQVSLTCLVKGFYPSDIAVEWESNGQPENNYKTTPPVLDSDGSFFLYSRLTVDKSRWQEGNVFSCSVMHEALHNHYTQKSLSLSLGPVGLIGNWVNVISDLKKIEDLIQSMHIDATLYTESDVHPSCKVTAMKCFLLELQVISLESGDASIHDTVENLIILANNSLSSNGNVTESGCKECEELEEKNIKEFLQSFVHIVQMFINTS

SEQ ID NO: 215 - DNA, 1689 bp, Artificial
  NHS76_IgG4_Heavy Chain_PVGLIG_IL15
caggtgcagctgcaggagtccggcccaggactggtgaagccttcggagaccctgtccctcacctgcgctgtctctggttactccatcagcagtggttactactggggctggattcggcagcccccagggaaggggctggagtggattgggagtatctatcatagtgggagcacctactacaacccgtccctcaagagtcgagtcaccatatcagtagacacgtccaagaaccagttctccctgaagctgagctctgtgaccgccgcagacacggccgtgtattactgtgcaagagggaagtggtcgaagtttgactattggggccaaggcaccctggtcaccgtctcttcagcgtccacaaagggccccagcgtgttccctctggccccctgcagcagaagcaccagcgagtctacagccgccctgggatgcctggtcaaggactacttccccgagcccgtgaccgtgtcctggaactctggcgccctgaccagcggcgtgcacacctttccagccgtgctgcagagcagcggcctgtacagcctgagcagcgtcgtgaccgtgcctagcagcagcctgggcaccaagacctacacctgtaacgtggaccacaagcccagcaacaccaaggtggacaagcgggtggaatctaagtacggccctccctgccccccctgcccagcccctgaatttctgggcggaccctccgtgttcctgttccccccaaagcccaaggacaccctgatgatcagccggacccccgaagtgacctgcgtggtggtggacgtgtcccaggaagatcccgaggtccagttcaactggtacgtggacggcgtggaagtgcacaacgccaagaccaagcccagagaggaacagttcaacagcacctaccgggtggtgtccgtgctgaccgtgctgcaccaggactggctgaacggcaaagagtacaagtgcaaggtctccaacaagggcctgcccagctccatcgagaaaaccatcagcaaggccaagggccagccccgcgagccccaggtgtacacactgccccccagccaggaagagatgaccaagaaccaggtgtccctgacctgcctcgtgaagggcttctaccccagcgatatcgccgtggaatgggagagcaacggccagcccgagaacaactacaagaccaccccccctgtgctggacagcgacggcagcttcttcctgtactcccggctgaccgtcgacaagagccggtggcaggaaggcaacgtcttcagctgcagcgtgatgcacgaggccctgcacaaccactacacccagaagtccctgagcctgagcctgggaccggtgggcctgattggcaactgggtgaatgtaataagtgatttgaaaaaaattgaagatcttattcaatctatgcatattgatgctactttatatacggaaagtgatgttcaccccagttgcaaagtaacagcaatgaagtgctttctcttggagttacaagttatttcacttgagtccggagatgcaagtattcatgatacagtagaaaatctgatcatcctagcaaacaacagtttgtcttctaatgggaatgtaacagaatctggatgcaaagaatgtgaggaactggaggaaaaaaatattaaagaatttttgcagagttttgtacatattgtccaaatgttcatcaacacttct

SEQ ID NO: 216 - protein, 563 aa, Artificial
  NHS76_IgG4_Heavy Chain_PVGLIG_IL15
QVQLQESGPGLVKPSETLSLTCAVSGYSISSGYYWGWIRQPPGKGLEWIGSIYHSGSTYYNPSLKSRVTISVDTSKNQFSLKLSSVTAADTAVYYCARGKWSKFDYWGQGTLVTVSSASTKGPSVFPLAPCSRSTSESTAALGCLVKDYFPEPVTVSWNSGALTSGVHTFPAVLQSSGLYSLSSVVTVPSSSLGTKTYTCNVDHKPSNTKVDKRVESKYGPPCPPCPAPEFLGGPSVFLFPPKPKDTLMISRTPEVTCVVVDVSQEDPEVQFNWYVDGVEVHNAKTKPREEQFNSTYRVVSVLTVLHQDWLNGKEYKCKVSNKGLPSSIEKTISKAKGQPREPQVYTLPPSQEEMTKNQVSLTCLVKGFYPSDIAVEWESNGQPENNYKTTPPVLDSDGSFFLYSRLTVDKSRWQEGNVFSCSVMHEALHNHYTQKSLSLSLGPVGLIGNWVNVISDLKKIEDLIQSMHIDATLYTESDVHPSCKVTAMKCFLLELQVISLESGDASIHDTVENLIILANNSLSSNGNVTESGCKECEELEEKNIKEFLQSFVHIVQMFINTS

SEQ ID NO: 217 - DNA, 1701 bp, Artificial
  Ganitumab_IgG1_Heavy Chain_SGRSA_IL15
caggtgcagctgcaggagtcgggaccaggactggtgaagccttcggggaccctgtccctcacctgcgctgtctctggtggctccatcagcagtagtaactggtggagttgggtccgccagcccccagggaaggggctggagtggattggggaaatctatcatagtgggagcaccaactacaacccgtccctcaagagtcgagtcaccatatcagtagacaagtccaagaaccagttctccctgaagctgagctctgtgaccgccgcggacacggccgtgtattactgtgcgagatggaccgggcgtactgatgcttttgatatctggggccaagggacaatggtcaccgtctcaagcgcgtccacaaagggcccaagcgtgttcccgctagcccccagcagcaagagcaccagcggcggcacagccgccctgggctgcctggtgaaggactacttccccgagcccgtgaccgtgtcctggaacagcggagccctgacctccggcgtgcacaccttccccgccgtgctgcagagcagcggcctgtacagcctgagcagcgtggtgaccgtgcccagcagcagcctgggcacccagacctacatctgtaacgtgaaccacaagcccagcaacaccaaggtggacaagagagtggagcccaagagctgtgacaagacccacacctgtcccccctgcccagcccccgagctgctgggcggacccagcgtgttcctgttcccccccaagcccaaggacaccctgatgatcagcagaacccccgaggtgacctgtgtggtggtggacgtgtcccacgaggacccagaggtgaagttcaactggtacgtggacggcgtggaggtgcacaacgccaagaccaagcccagagaggagcagtacaacagcacctacagggtggtgtccgtgctgaccgtgctgcaccaggactggctgaacggcaaggagtacaagtgtaaggtgtccaacaaggccctgccagccccaatcgaaaagaccatcagcaaggccaagggccagccaagagagccccaggtgtacaccctgccacccagcagggaggagatgaccaagaaccaggtgtccctgacctgtctggtgaagggcttctacccaagcgacatcgccgtggagtgggagagcaacggccagcccgagaacaactacaagaccacccccccagtgctggacagcgacggcagcttcttcctgtacagcaagctgaccgtggacaagagcagatggcagcagggcaacgtgttcagctgctccgtgatgcacgaggccctgcacaaccactacacccagaagagcctgagcctgtccccaggctcaggcagatctgccaactgggtgaatgtaataagtgatttgaaaaaaattgaagatcttattcaatctatgcatattgatgctactttatatacggaaagtgatgttcaccccagttgcaaagtaacagcaatgaagtgctttctcttggagttacaagttatttcacttgagtccggagatgcaagtattcatgatacagtagaaaatctgatcatcctagcaaacaacagtttgtcttctaatgggaatgtaacagaatctggatgcaaagaatgtgaggaactggaggaaaaaaatattaaagaatttttgcagagttttgtacatattgtccaaatgttcatcaacacttct

SEQ ID NO: 218 - protein, 567 aa, Artificial
  Ganitumab_IgG1_Heavy Chain_SGRSA_IL15
QVQLQESGPGLVKPSGTLSLTCAVSGGSISSSNWWSWVRQPPGKGLEWIGEIYHSGSTNYNPSLKSRVTISVDKSKNQFSLKLSSVTAADTAVYYCARWTGRTDAFDIWGQGTMVTVSSASTKGPSVFPLAPSSKSTSGGTAALGCLVKDYFPEPVTVSWNSGALTSGVHTFPAVLQSSGLYSLSSVVTVPSSSLGTQTYICNVNHKPSNTKVDKRVEPKSCDKTHTCPPCPAPELLGGPSVFLFPPKPKDTLMISRTPEVTCVVVDVSHEDPEVKFNWYVDGVEVHNAKTKPREEQYNSTYRVVSVLTVLHQDWLNGKEYKCKVSNKALPAPIEKTISKAKGQPREPQVYTLPPSREEMTKNQVSLTCLVKGFYPSDIAVEWESNGQPENNYKTTPPVLDSDGSFFLYSKLTVDKSRWQQGNVFSCSVMHEALHNHYTQKSLSLSPGSGRSANWVNVISDLKKIEDLIQSMHIDATLYTESDVHPSCKVTAMKCFLLELQVISLESGDASIHDTVENLIILANNSLSSNGNVTESGCKECEELEEKNIKEFLQSFVHIVQMFINTS

SEQ ID NO: 219 - DNA, 1722 bp, Artificial
  Ganitumab_IgG1_Heavy Chain_PVGLIG_IPVGLIG_L15
caggtgcagctgcaggagtcgggaccaggactggtgaagccttcggggaccctgtccctcacctgcgctgtctctggtggctccatcagcagtagtaactggtggagttgggtccgccagcccccagggaaggggctggagtggattggggaaatctatcatagtgggagcaccaactacaacccgtccctcaagagtcgagtcaccatatcagtagacaagtccaagaaccagttctccctgaagctgagctctgtgaccgccgcggacacggccgtgtattactgtgcgagatggaccgggcgtactgatgcttttgatatctggggccaagggacaatggtcaccgtctcaagcgcgtccacaaagggcccaagcgtgttcccgctagcccccagcagcaagagcaccagcggcggcacagccgccctgggctgcctggtgaaggactacttccccgagcccgtgaccgtgtcctggaacagcggagccctgacctccggcgtgcacaccttccccgccgtgctgcagagcagcggcctgtacagcctgagcagcgtggtgaccgtgcccagcagcagcctgggcacccagacctacatctgtaacgtgaaccacaagcccagcaacaccaaggtggacaagagagtggagcccaagagctgtgacaagacccacacctgtcccccctgcccagcccccgagctgctgggcggacccagcgtgttcctgttcccccccaagcccaaggacaccctgatgatcagcagaacccccgaggtgacctgtgtggtggtggacgtgtcccacgaggacccagaggtgaagttcaactggtacgtggacggcgtggaggtgcacaacgccaagaccaagcccagagaggagcagtacaacagcacctacagggtggtgtccgtgctgaccgtgctgcaccaggactggctgaacggcaaggagtacaagtgtaaggtgtccaacaaggccctgccagccccaatcgaaaagaccatcagcaaggccaagggccagccaagagagccccaggtgtacaccctgccacccagcagggaggagatgaccaagaaccaggtgtccctgacctgtctggtgaagggcttctacccaagcgacatcgccgtggagtgggagagcaacggccagcccgagaacaactacaagaccacccccccagtgctggacagcgacggcagcttcttcctgtacagcaagctgaccgtggacaagagcagatggcagcagggcaacgtgttcagctgctccgtgatgcacgaggccctgcacaaccactacacccagaagagcctgagcctgtccccaggccctgtcggactcatcggaccggtgggcctgattggcaactgggtgaatgtaataagtgatttgaaaaaaattgaagatcttattcaatctatgcatattgatgctactttatatacggaaagtgatgttcaccccagttgcaaagtaacagcaatgaagtgctttctcttggagttacaagttatttcacttgagtccggagatgcaagtattcatgatacagtagaaaatctgatcatcctagcaaacaacagtttgtcttctaatgggaatgtaacagaatctggatgcaaagaatgtgaggaactggaggaaaaaaatattaaagaatttttgcagagttttgtacatattgtccaaatgttcatcaacacttct

SEQ ID NO: 220 - protein, 574 aa, Artificial
  Ganitumab_IgG1_Heavy Chain_PVGLIG_IPVGLIG_L15
QVQLQESGPGLVKPSGTLSLTCAVSGGSISSSNWWSWVRQPPGKGLEWIGEIYHSGSTNYNPSLKSRVTISVDKSKNQFSLKLSSVTAADTAVYYCARWTGRTDAFDIWGQGTMVTVSSASTKGPSVFPLAPSSKSTSGGTAALGCLVKDYFPEPVTVSWNSGALTSGVHTFPAVLQSSGLYSLSSVVTVPSSSLGTQTYICNVNHKPSNTKVDKRVEPKSCDKTHTCPPCPAPELLGGPSVFLFPPKPKDTLMISRTPEVTCVVVDVSHEDPEVKFNWYVDGVEVHNAKTKPREEQYNSTYRVVSVLTVLHQDWLNGKEYKCKVSNKALPAPIEKTISKAKGQPREPQVYTLPPSREEMTKNQVSLTCLVKGFYPSDIAVEWESNGQPENNYKTTPPVLDSDGSFFLYSKLTVDKSRWQQGNVFSCSVMHEALHNHYTQKSLSLSPGPVGLIGPVGLIGNWVNVISDLKKIEDLIQSMHIDATLYTESDVHPSCKVTAMKCFLLELQVISLESGDASIHDTVENLIILANNSLSSNGNVTESGCKECEELEEKNIKEFLQSFVHIVQMFINTS

SEQ ID NO: 221 - DNA, 1713 bp, Artificial
  Ganitumab_IgG4_Heavy Chain_PVGLIG_IPVGLIG_L15
caggtgcagctgcaggagtcgggaccaggactggtgaagccttcggggaccctgtccctcacctgcgctgtctctggtggctccatcagcagtagtaactggtggagttgggtccgccagcccccagggaaggggctggagtggattggggaaatctatcatagtgggagcaccaactacaacccgtccctcaagagtcgagtcaccatatcagtagacaagtccaagaaccagttctccctgaagctgagctctgtgaccgccgcggacacggccgtgtattactgtgcgagatggaccgggcgtactgatgcttttgatatctggggccaagggacaatggtcaccgtctcaagcgcgtccacaaagggccccagcgtgttccctctggccccctgcagcagaagcaccagcgagtctacagccgccctgggatgcctggtcaaggactacttccccgagcccgtgaccgtgtcctggaactctggcgccctgaccagcggcgtgcacacctttccagccgtgctgcagagcagcggcctgtacagcctgagcagcgtcgtgaccgtgcctagcagcagcctgggcaccaagacctacacctgtaacgtggaccacaagcccagcaacaccaaggtggacaagcgggtggaatctaagtacggccctccctgccccccctgcccagcccctgaatttctgggcggaccctccgtgttcctgttccccccaaagcccaaggacaccctgatgatcagccggacccccgaagtgacctgcgtggtggtggacgtgtcccaggaagatcccgaggtccagttcaactggtacgtggacggcgtggaagtgcacaacgccaagaccaagcccagagaggaacagttcaacagcacctaccgggtggtgtccgtgctgaccgtgctgcaccaggactggctgaacggcaaagagtacaagtgcaaggtctccaacaagggcctgcccagctccatcgagaaaaccatcagcaaggccaagggccagccccgcgagccccaggtgtacacactgccccccagccaggaagagatgaccaagaaccaggtgtccctgacctgcctcgtgaagggcttctaccccagcgatatcgccgtggaatgggagagcaacggccagcccgagaacaactacaagaccaccccccctgtgctggacagcgacggcagcttcttcctgtactcccggctgaccgtcgacaagagccggtggcaggaaggcaacgtcttcagctgcagcgtgatgcacgaggccctgcacaaccactacacccagaagtccctgagcctgagcctgggacctgtcggactcatcggaccggtgggcctgattggcaactgggtgaatgtaataagtgatttgaaaaaaattgaagatcttattcaatctatgcatattgatgctactttatatacggaaagtgatgttcaccccagttgcaaagtaacagcaatgaagtgctttctcttggagttacaagttatttcacttgagtccggagatgcaagtattcatgatacagtagaaaatctgatcatcctagcaaacaacagtttgtcttctaatgggaatgtaacagaatctggatgcaaagaatgtgaggaactggaggaaaaaaatattaaagaatttttgcagagttttgtacatattgtccaaatgttcatcaacacttct

SEQ ID NO: 222 - protein, 571 aa, Artificial
  Ganitumab_IgG4_Heavy Chain_PVGLIG_IPVGLIG_L15
QVQLQESGPGLVKPSGTLSLTCAVSGGSISSSNWWSWVRQPPGKGLEWIGEIYHSGSTNYNPSLKSRVTISVDKSKNQFSLKLSSVTAADTAVYYCARWTGRTDAFDIWGQGTMVTVSSASTKGPSVFPLAPCSRSTSESTAALGCLVKDYFPEPVTVSWNSGALTSGVHTFPAVLQSSGLYSLSSVVTVPSSSLGTKTYTCNVDHKPSNTKVDKRVESKYGPPCPPCPAPEFLGGPSVFLFPPKPKDTLMISRTPEVTCVVVDVSQEDPEVQFNWYVDGVEVHNAKTKPREEQFNSTYRVVSVLTVLHQDWLNGKEYKCKVSNKGLPSSIEKTISKAKGQPREPQVYTLPPSQEEMTKNQVSLTCLVKGFYPSDIAVEWESNGQPENNYKTTPPVLDSDGSFFLYSRLTVDKSRWQEGNVFSCSVMHEALHNHYTQKSLSLSLGPVGLIGPVGLIGNWVNVISDLKKIEDLIQSMHIDATLYTESDVHPSCKVTAMKCFLLELQVISLESGDASIHDTVENLIILANNSLSSNGNVTESGCKECEELEEKNIKEFLQSFVHIVQMFINTS

SEQ ID NO: 223 - DNA, 1704 bp, Artificial
  m9G4_IgG1_Heavy Chain_PVGLIG_IPVGLIG_L15
gaagtgatgttggtagaaagcggtggtgggctggtgaaacctggcgggtccctgaaactctcctgtactgctagtggattcacattcagcacttacgacatgtcatgggtccggcagaccccagagaagagactggagtgggtcagcactatctcctcttctcggacctatacgtattacagtgccagcgtcaagggacgctttaccattagcagggataatgccagaaacatactgtacctgcagatgtcaagcctccgaagtgaggacaccgccatgtattactgcgctaggcaattttcacactggggccaggggacattggttaccgtgtctgcagcgtccacaaagggcccaagcgtgttcccgctagcccccagcagcaagagcaccagcggcggcacagccgccctgggctgcctggtgaaggactacttccccgagcccgtgaccgtgtcctggaacagcggagccctgacctccggcgtgcacaccttccccgccgtgctgcagagcagcggcctgtacagcctgagcagcgtggtgaccgtgcccagcagcagcctgggcacccagacctacatctgtaacgtgaaccacaagcccagcaacaccaaggtggacaagagagtggagcccaagagctgtgacaagacccacacctgtcccccctgcccagcccccgagctgctgggcggacccagcgtgttcctgttcccccccaagcccaaggacaccctgatgatcagcagaacccccgaggtgacctgtgtggtggtggacgtgtcccacgaggacccagaggtgaagttcaactggtacgtggacggcgtggaggtgcacaacgccaagaccaagcccagagaggagcagtacaacagcacctacagggtggtgtccgtgctgaccgtgctgcaccaggactggctgaacggcaaggagtacaagtgtaaggtgtccaacaaggccctgccagccccaatcgaaaagaccatcagcaaggccaagggccagccaagagagccccaggtgtacaccctgccacccagcagggaggagatgaccaagaaccaggtgtccctgacctgtctggtgaagggcttctacccaagcgacatcgccgtggagtgggagagcaacggccagcccgagaacaactacaagaccacccccccagtgctggacagcgacggcagcttcttcctgtacagcaagctgaccgtggacaagagcagatggcagcagggcaacgtgttcagctgctccgtgatgcacgaggccctgcacaaccactacacccagaagagcctgagcctgtccccaggccctgtcggactcatcggaccggtgggcctgattggcaactgggtgaatgtaataagtgatttgaaaaaaattgaagatcttattcaatctatgcatattgatgctactttatatacggaaagtgatgttcaccccagttgcaaagtaacagcaatgaagtgctttctcttggagttacaagttatttcacttgagtccggagatgcaagtattcatgatacagtagaaaatctgatcatcctagcaaacaacagtttgtcttctaatgggaatgtaacagaatctggatgcaaagaatgtgaggaactggaggaaaaaaatattaaagaatttttgcagagttttgtacatattgtccaaatgttcatcaacacttct

SEQ ID NO: 224 - protein, 568 aa, Artificial
  m9G4_IgG1_Heavy Chain_PVGLIG_IPVGLIG_L15
EVMLVESGGGLVKPGGSLKLSCTASGFTFSTYDMSWVRQTPEKRLEWVSTISSSRTYTYYSASVKGRFTISRDNARNILYLQMSSLRSEDTAMYYCARQFSHWGQGTLVTVSAASTKGPSVFPLAPSSKSTSGGTAALGCLVKDYFPEPVTVSWNSGALTSGVHTFPAVLQSSGLYSLSSVVTVPSSSLGTQTYICNVNHKPSNTKVDKRVEPKSCDKTHTCPPCPAPELLGGPSVFLFPPKPKDTLMISRTPEVTCVVVDVSHEDPEVKFNWYVDGVEVHNAKTKPREEQYNSTYRVVSVLTVLHQDWLNGKEYKCKVSNKALPAPIEKTISKAKGQPREPQVYTLPPSREEMTKNQVSLTCLVKGFYPSDIAVEWESNGQPENNYKTTPPVLDSDGSFFLYSKLTVDKSRWQQGNVFSCSVMHEALHNHYTQKSLSLSPGPVGLIGPVGLIGNWVNVISDLKKIEDLIQSMHIDATLYTESDVHPSCKVTAMKCFLLELQVISLESGDASIHDTVENLIILANNSLSSNGNVTESGCKECEELEEKNIKEFLQSFVHIVQMFINTS

SEQ ID NO: 225 - DNA, 1695 bp, Artificial
  m9G4_IgG4_Heavy Chain_PVGLIG_IPVGLIG_L15
gaagtgatgttggtagaaagcggtggtgggctggtgaaacctggcgggtccctgaaactctcctgtactgctagtggattcacattcagcacttacgacatgtcatgggtccggcagaccccagagaagagactggagtgggtcagcactatctcctcttctcggacctatacgtattacagtgccagcgtcaagggacgctttaccattagcagggataatgccagaaacatactgtacctgcagatgtcaagcctccgaagtgaggacaccgccatgtattactgcgctaggcaattttcacactggggccaggggacattggttaccgtgtctgcagcgtccacaaagggccccagcgtgttccctctggccccctgcagcagaagcaccagcgagtctacagccgccctgggatgcctggtcaaggactacttccccgagcccgtgaccgtgtcctggaactctggcgccctgaccagcggcgtgcacacctttccagccgtgctgcagagcagcggcctgtacagcctgagcagcgtcgtgaccgtgcctagcagcagcctgggcaccaagacctacacctgtaacgtggaccacaagcccagcaacaccaaggtggacaagcgggtggaatctaagtacggccctccctgccccccctgcccagcccctgaatttctgggcggaccctccgtgttcctgttccccccaaagcccaaggacaccctgatgatcagccggacccccgaagtgacctgcgtggtggtggacgtgtcccaggaagatcccgaggtccagttcaactggtacgtggacggcgtggaagtgcacaacgccaagaccaagcccagagaggaacagttcaacagcacctaccgggtggtgtccgtgctgaccgtgctgcaccaggactggctgaacggcaaagagtacaagtgcaaggtctccaacaagggcctgcccagctccatcgagaaaaccatcagcaaggccaagggccagccccgcgagccccaggtgtacacactgccccccagccaggaagagatgaccaagaaccaggtgtccctgacctgcctcgtgaagggcttctaccccagcgatatcgccgtggaatgggagagcaacggccagcccgagaacaactacaagaccaccccccctgtgctggacagcgacggcagcttcttcctgtactcccggctgaccgtcgacaagagccggtggcaggaaggcaacgtcttcagctgcagcgtgatgcacgaggccctgcacaaccactacacccagaagtccctgagcctgagcctgggacctgtcggactcatcggaccggtgggcctgattggcaactgggtgaatgtaataagtgatttgaaaaaaattgaagatcttattcaatctatgcatattgatgctactttatatacggaaagtgatgttcaccccagttgcaaagtaacagcaatgaagtgctttctcttggagttacaagttatttcacttgagtccggagatgcaagtattcatgatacagtagaaaatctgatcatcctagcaaacaacagtttgtcttctaatgggaatgtaacagaatctggatgcaaagaatgtgaggaactggaggaaaaaaatattaaagaatttttgcagagttttgtacatattgtccaaatgttcatcaacacttct

SEQ ID NO: 226 - protein, 565 aa, Artificial
  m9G4_IgG4_Heavy Chain_PVGLIG_IPVGLIG_L15
EVMLVESGGGLVKPGGSLKLSCTASGFTFSTYDMSWVRQTPEKRLEWVSTISSSRTYTYYSASVKGRFTISRDNARNILYLQMSSLRSEDTAMYYCARQFSHWGQGTLVTVSAASTKGPSVFPLAPCSRSTSESTAALGCLVKDYFPEPVTVSWNSGALTSGVHTFPAVLQSSGLYSLSSVVTVPSSSLGTKTYTCNVDHKPSNTKVDKRVESKYGPPCPPCPAPEFLGGPSVFLFPPKPKDTLMISRTPEVTCVVVDVSQEDPEVQFNWYVDGVEVHNAKTKPREEQFNSTYRVVSVLTVLHQDWLNGKEYKCKVSNKGLPSSIEKTISKAKGQPREPQVYTLPPSQEEMTKNQVSLTCLVKGFYPSDIAVEWESNGQPENNYKTTPPVLDSDGSFFLYSRLTVDKSRWQEGNVFSCSVMHEALHNHYTQKSLSLSLGPVGLIGPVGLIGNWVNVISDLKKIEDLIQSMHIDATLYTESDVHPSCKVTAMKCFLLELQVISLESGDASIHDTVENLIILANNSLSSNGNVTESGCKECEELEEKNIKEFLQSFVHIVQMFINTS

SEQ ID NO: 227 - DNA, 1716 bp, Artificial
  NHS76_IgG1_Heavy Chain_PVGLIG_IPVGLIG_L15
caggtgcagctgcaggagtccggcccaggactggtgaagccttcggagaccctgtccctcacctgcgctgtctctggttactccatcagcagtggttactactggggctggattcggcagcccccagggaaggggctggagtggattgggagtatctatcatagtgggagcacctactacaacccgtccctcaagagtcgagtcaccatatcagtagacacgtccaagaaccagttctccctgaagctgagctctgtgaccgccgcagacacggccgtgtattactgtgcaagagggaagtggtcgaagtttgactattggggccaaggcaccctggtcaccgtctcttcagcgtccacaaagggcccaagcgtgttcccgctagcccccagcagcaagagcaccagcggcggcacagccgccctgggctgcctggtgaaggactacttccccgagcccgtgaccgtgtcctggaacagcggagccctgacctccggcgtgcacaccttccccgccgtgctgcagagcagcggcctgtacagcctgagcagcgtggtgaccgtgcccagcagcagcctgggcacccagacctacatctgtaacgtgaaccacaagcccagcaacaccaaggtggacaagagagtggagcccaagagctgtgacaagacccacacctgtcccccctgcccagcccccgagctgctgggcggacccagcgtgttcctgttcccccccaagcccaaggacaccctgatgatcagcagaacccccgaggtgacctgtgtggtggtggacgtgtcccacgaggacccagaggtgaagttcaactggtacgtggacggcgtggaggtgcacaacgccaagaccaagcccagagaggagcagtacaacagcacctacagggtggtgtccgtgctgaccgtgctgcaccaggactggctgaacggcaaggagtacaagtgtaaggtgtccaacaaggccctgccagccccaatcgaaaagaccatcagcaaggccaagggccagccaagagagccccaggtgtacaccctgccacccagcagggaggagatgaccaagaaccaggtgtccctgacctgtctggtgaagggcttctacccaagcgacatcgccgtggagtgggagagcaacggccagcccgagaacaactacaagaccacccccccagtgctggacagcgacggcagcttcttcctgtacagcaagctgaccgtggacaagagcagatggcagcagggcaacgtgttcagctgctccgtgatgcacgaggccctgcacaaccactacacccagaagagcctgagcctgtccccaggccctgtcggactcatcggaccggtgggcctgattggcaactgggtgaatgtaataagtgatttgaaaaaaattgaagatcttattcaatctatgcatattgatgctactttatatacggaaagtgatgttcaccccagttgcaaagtaacagcaatgaagtgctttctcttggagttacaagttatttcacttgagtccggagatgcaagtattcatgatacagtagaaaatctgatcatcctagcaaacaacagtttgtcttctaatgggaatgtaacagaatctggatgcaaagaatgtgaggaactggaggaaaaaaatattaaagaatttttgcagagttttgtacatattgtccaaatgttcatcaacacttct

SEQ ID NO: 228 - protein, 474 aa, Artificial
  NHS76_IgG1_Heavy Chain_PVGLIG_IPVGLIG_L15
QVQLQESGPGLVKPSETLSLTCAVSGYSISSGYYWGWIRQPPGKGLEWIGSIYHSGSTYYNPSLKSRVTISVDTSKNQFSLKLSSVTAADTAVYYCARGKWSKFDYWGQGTLVTVSSASTKGPSVFPLAPSSKSTSGGTAALGCLVKDYFPEPVTVSWNSGALTSGVHTFPAVLQSSGLYSLSSVVTVPSSSLGTQTYICNVNHKPSNTKVDKRVEPKSCDKTHTCPPCPAPELLGGPSVFLFPPKPKDTLMISRTPEVTCVVVDVSHEDPEVKFNWYVDGVEVHNAKTKPREEQYNSTYRVVSVLTVLHQDWLNGKEYKCKVSNKALPAPIEKTISKAKGQPREPQVYTLPPSREEMTKNQVSLTCLVKGFYPSDIAVEWESNGQPENNYKTTPPVLDSDGSFFLYSKLTVDKSRWQQGNVFSCSVMHEALHNHYTQKSLSLSPGPVGLIGPVGLIGNWVNVISDLKKIEDLI

SEQ ID NO: 229 - DNA, 1707 bp, Artificial
  NHS76_IgG4_Heavy Chain_PVGLIG_IPVGLIG_L15
caggtgcagctgcaggagtccggcccaggactggtgaagccttcggagaccctgtccctcacctgcgctgtctctggttactccatcagcagtggttactactggggctggattcggcagcccccagggaaggggctggagtggattgggagtatctatcatagtgggagcacctactacaacccgtccctcaagagtcgagtcaccatatcagtagacacgtccaagaaccagttctccctgaagctgagctctgtgaccgccgcagacacggccgtgtattactgtgcaagagggaagtggtcgaagtttgactattggggccaaggcaccctggtcaccgtctcttcagcgtccacaaagggccccagcgtgttccctctggccccctgcagcagaagcaccagcgagtctacagccgccctgggatgcctggtcaaggactacttccccgagcccgtgaccgtgtcctggaactctggcgccctgaccagcggcgtgcacacctttccagccgtgctgcagagcagcggcctgtacagcctgagcagcgtcgtgaccgtgcctagcagcagcctgggcaccaagacctacacctgtaacgtggaccacaagcccagcaacaccaaggtggacaagcgggtggaatctaagtacggccctccctgccccccctgcccagcccctgaatttctgggcggaccctccgtgttcctgttccccccaaagcccaaggacaccctgatgatcagccggacccccgaagtgacctgcgtggtggtggacgtgtcccaggaagatcccgaggtccagttcaactggtacgtggacggcgtggaagtgcacaacgccaagaccaagcccagagaggaacagttcaacagcacctaccgggtggtgtccgtgctgaccgtgctgcaccaggactggctgaacggcaaagagtacaagtgcaaggtctccaacaagggcctgcccagctccatcgagaaaaccatcagcaaggccaagggccagccccgcgagccccaggtgtacacactgccccccagccaggaagagatgaccaagaaccaggtgtccctgacctgcctcgtgaagggcttctaccccagcgatatcgccgtggaatgggagagcaacggccagcccgagaacaactacaagaccaccccccctgtgctggacagcgacggcagcttcttcctgtactcccggctgaccgtcgacaagagccggtggcaggaaggcaacgtcttcagctgcagcgtgatgcacgaggccctgcacaaccactacacccagaagtccctgagcctgagcctgggacctgtcggactcatcggaccggtgggcctgattggcaactgggtgaatgtaataagtgatttgaaaaaaattgaagatcttattcaatctatgcatattgatgctactttatatacggaaagtgatgttcaccccagttgcaaagtaacagcaatgaagtgctttctcttggagttacaagttatttcacttgagtccggagatgcaagtattcatgatacagtagaaaatctgatcatcctagcaaacaacagtttgtcttctaatgggaatgtaacagaatctggatgcaaagaatgtgaggaactggaggaaaaaaatattaaagaatttttgcagagttttgtacatattgtccaaatgttcatcaacacttct

SEQ ID NO: 230 - protein, 569 aa, Artificial
  NHS76_IgG4_Heavy Chain_PVGLIG_IPVGLIG_L15
QVQLQESGPGLVKPSETLSLTCAVSGYSISSGYYWGWIRQPPGKGLEWIGSIYHSGSTYYNPSLKSRVTISVDTSKNQFSLKLSSVTAADTAVYYCARGKWSKFDYWGQGTLVTVSSASTKGPSVFPLAPCSRSTSESTAALGCLVKDYFPEPVTVSWNSGALTSGVHTFPAVLQSSGLYSLSSVVTVPSSSLGTKTYTCNVDHKPSNTKVDKRVESKYGPPCPPCPAPEFLGGPSVFLFPPKPKDTLMISRTPEVTCVVVDVSQEDPEVQFNWYVDGVEVHNAKTKPREEQFNSTYRVVSVLTVLHQDWLNGKEYKCKVSNKGLPSSIEKTISKAKGQPREPQVYTLPPSQEEMTKNQVSLTCLVKGFYPSDIAVEWESNGQPENNYKTTPPVLDSDGSFFLYSRLTVDKSRWQEGNVFSCSVMHEALHNHYTQKSLSLSLGPVGLIGPVGLIGNWVNVISDLKKIEDLIQSMHIDATLYTESDVHPSCKVTAMKCFLLELQVISLESGDASIHDTVENLIILANNSLSSNGNVTESGCKECEELEEKNIKEFLQSFVHIVQMFINTS

SEQ ID NO: 231 - DNA, 1989 bp, Artificial
  Ganitumab_IgG1_Heavy Chain_PVGLIG_IL15 [nc30-Sushi]
caggtgcagctgcaggagtcgggaccaggactggtgaagccttcggggaccctgtccctcacctgcgctgtctctggtggctccatcagcagtagtaactggtggagttgggtccgccagcccccagggaaggggctggagtggattggggaaatctatcatagtgggagcaccaactacaacccgtccctcaagagtcgagtcaccatatcagtagacaagtccaagaaccagttctccctgaagctgagctctgtgaccgccgcggacacggccgtgtattactgtgcgagatggaccgggcgtactgatgcttttgatatctggggccaagggacaatggtcaccgtctcaagcgcgtccacaaagggcccaagcgtgttcccgctagcccccagcagcaagagcaccagcggcggcacagccgccctgggctgcctggtgaaggactacttccccgagcccgtgaccgtgtcctggaacagcggagccctgacctccggcgtgcacaccttccccgccgtgctgcagagcagcggcctgtacagcctgagcagcgtggtgaccgtgcccagcagcagcctgggcacccagacctacatctgtaacgtgaaccacaagcccagcaacaccaaggtggacaagagagtggagcccaagagctgtgacaagacccacacctgtcccccctgcccagcccccgagctgctgggcggacccagcgtgttcctgttcccccccaagcccaaggacaccctgatgatcagcagaacccccgaggtgacctgtgtggtggtggacgtgtcccacgaggacccagaggtgaagttcaactggtacgtggacggcgtggaggtgcacaacgccaagaccaagcccagagaggagcagtacaacagcacctacagggtggtgtccgtgctgaccgtgctgcaccaggactggctgaacggcaaggagtacaagtgtaaggtgtccaacaaggccctgccagccccaatcgaaaagaccatcagcaaggccaagggccagccaagagagccccaggtgtacaccctgccacccagcagggaggagatgaccaagaaccaggtgtccctgacctgtctggtgaagggcttctacccaagcgacatcgccgtggagtgggagagcaacggccagcccgagaacaactacaagaccacccccccagtgctggacagcgacggcagcttcttcctgtacagcaagctgaccgtggacaagagcagatggcagcagggcaacgtgttcagctgctccgtgatgcacgaggccctgcacaaccactacacccagaagagcctgagcctgtccccaggcccggtgggcctgattggcaactgggtgaatgtaataagtgatttgaaaaaaattgaagatcttattcaatctatgcatattgatgctactttatatacggaaagtgatgttcaccccagttgcaaagtaacagcaatgaagtgctttctcttggagttacaagttatttcacttgagtccggagatgcaagtattcatgatacagtagaaaatctgatcatcctagcaaacaacagtttgtcttctaatgggaatgtaacagaatctggatgcaaagaatgtgaggaactggaggaaaaaaatattaaagaatttttgcagagttttgtacatattgtccaaatgttcatcaacacttctggaggcggaggatctggtggtggtggatctggcggcggaggaagtggcggaggcggaagcggtggtggcggttcaggtggcggagctagcatcacctgtcctccacctatgagcgtggaacacgccgacatctgggtcaagagctacagcctgtacagcagagagcggtacatctgcaacagcggcttcaagagaaaggccggcacaagcagcctgaccgagtgtgtgctgaacaaggccacaaacgtggcccactggaccacacctagcctgaagtgcatcaga

SEQ ID NO: 232 - protein, 663 aa, Artificial
  Ganitumab_IgG1_Heavy Chain_PVGLIG_IL15 [nc30-Sushi]
QVQLQESGPGLVKPSGTLSLTCAVSGGSISSSNWWSWVRQPPGKGLEWIGEIYHSGSTNYNPSLKSRVTISVDKSKNQFSLKLSSVTAADTAVYYCARWTGRTDAFDIWGQGTMVTVSSASTKGPSVFPLAPSSKSTSGGTAALGCLVKDYFPEPVTVSWNSGALTSGVHTFPAVLQSSGLYSLSSVVTVPSSSLGTQTYICNVNHKPSNTKVDKRVEPKSCDKTHTCPPCPAPELLGGPSVFLFPPKPKDTLMISRTPEVTCVVVDVSHEDPEVKFNWYVDGVEVHNAKTKPREEQYNSTYRVVSVLTVLHQDWLNGKEYKCKVSNKALPAPIEKTISKAKGQPREPQVYTLPPSREEMTKNQVSLTCLVKGFYPSDIAVEWESNGQPENNYKTTPPVLDSDGSFFLYSKLTVDKSRWQQGNVFSCSVMHEALHNHYTQKSLSLSPGPVGLIGNWVNVISDLKKIEDLIQSMHIDATLYTESDVHPSCKVTAMKCFLLELQVISLESGDASIHDTVENLIILANNSLSSNGNVTESGCKECEELEEKNIKEFLQSFVHIVQMFINTSGGGGSGGGGSGGGGSGGGGSGGGGSGGGASITCPPPMSVEHADIWVKSYSLYSRERYICNSGFKRKAGTSSLTECVLNKATNVAHWTTPSLKCIR

SEQ ID NO: 233 - DNA, 1980 bp, Artificial
  Ganitumab_IgG4_Heavy Chain_PVGLIG_IL15 [nc30-Sushi]
caggtgcagctgcaggagtcgggaccaggactggtgaagccttcggggaccctgtccctcacctgcgctgtctctggtggctccatcagcagtagtaactggtggagttgggtccgccagcccccagggaaggggctggagtggattggggaaatctatcatagtgggagcaccaactacaacccgtccctcaagagtcgagtcaccatatcagtagacaagtccaagaaccagttctccctgaagctgagctctgtgaccgccgcggacacggccgtgtattactgtgcgagatggaccgggcgtactgatgcttttgatatctggggccaagggacaatggtcaccgtctcaagcgcgtccacaaagggccccagcgtgttccctctggccccctgcagcagaagcaccagcgagtctacagccgccctgggatgcctggtcaaggactacttccccgagcccgtgaccgtgtcctggaactctggcgccctgaccagcggcgtgcacacctttccagccgtgctgcagagcagcggcctgtacagcctgagcagcgtcgtgaccgtgcctagcagcagcctgggcaccaagacctacacctgtaacgtggaccacaagcccagcaacaccaaggtggacaagcgggtggaatctaagtacggccctccctgccccccctgcccagcccctgaatttctgggcggaccctccgtgttcctgttccccccaaagcccaaggacaccctgatgatcagccggacccccgaagtgacctgcgtggtggtggacgtgtcccaggaagatcccgaggtccagttcaactggtacgtggacggcgtggaagtgcacaacgccaagaccaagcccagagaggaacagttcaacagcacctaccgggtggtgtccgtgctgaccgtgctgcaccaggactggctgaacggcaaagagtacaagtgcaaggtctccaacaagggcctgcccagctccatcgagaaaaccatcagcaaggccaagggccagccccgcgagccccaggtgtacacactgccccccagccaggaagagatgaccaagaaccaggtgtccctgacctgcctcgtgaagggcttctaccccagcgatatcgccgtggaatgggagagcaacggccagcccgagaacaactacaagaccaccccccctgtgctggacagcgacggcagcttcttcctgtactcccggctgaccgtcgacaagagccggtggcaggaaggcaacgtcttcagctgcagcgtgatgcacgaggccctgcacaaccactacacccagaagtccctgagcctgagcctgggaccggtgggcctgattggcaactgggtgaatgtaataagtgatttgaaaaaaattgaagatcttattcaatctatgcatattgatgctactttatatacggaaagtgatgttcaccccagttgcaaagtaacagcaatgaagtgctttctcttggagttacaagttatttcacttgagtccggagatgcaagtattcatgatacagtagaaaatctgatcatcctagcaaacaacagtttgtcttctaatgggaatgtaacagaatctggatgcaaagaatgtgaggaactggaggaaaaaaatattaaagaatttttgcagagttttgtacatattgtccaaatgttcatcaacacttctggaggcggaggatctggtggtggtggatctggcggcggaggaagtggcggaggcggaagcggtggtggcggttcaggtggcggagctagcatcacctgtcctccacctatgagcgtggaacacgccgacatctgggtcaagagctacagcctgtacagcagagagcggtacatctgcaacagcggcttcaagagaaaggccggcacaagcagcctgaccgagtgtgtgctgaacaaggccacaaacgtggcccactggaccacacctagcctgaagtgcatcaga

SEQ ID NO: 234 - protein, 660 aa, Artificial
  Ganitumab_IgG4_Heavy Chain_PVGLIG_IL15 [nc30-Sushi]
QVQLQESGPGLVKPSGTLSLTCAVSGGSISSSNWWSWVRQPPGKGLEWIGEIYHSGSTNYNPSLKSRVTISVDKSKNQFSLKLSSVTAADTAVYYCARWTGRTDAFDIWGQGTMVTVSSASTKGPSVFPLAPCSRSTSESTAALGCLVKDYFPEPVTVSWNSGALTSGVHTFPAVLQSSGLYSLSSVVTVPSSSLGTKTYTCNVDHKPSNTKVDKRVESKYGPPCPPCPAPEFLGGPSVFLFPPKPKDTLMISRTPEVTCVVVDVSQEDPEVQFNWYVDGVEVHNAKTKPREEQFNSTYRVVSVLTVLHQDWLNGKEYKCKVSNKGLPSSIEKTISKAKGQPREPQVYTLPPSQEEMTKNQVSLTCLVKGFYPSDIAVEWESNGQPENNYKTTPPVLDSDGSFFLYSRLTVDKSRWQEGNVFSCSVMHEALHNHYTQKSLSLSLGPVGLIGNWVNVISDLKKIEDLIQSMHIDATLYTESDVHPSCKVTAMKCFLLELQVISLESGDASIHDTVENLIILANNSLSSNGNVTESGCKECEELEEKNIKEFLQSFVHIVQMFINTSGGGGSGGGGSGGGGSGGGGSGGGGSGGGASITCPPPMSVEHADIWVKSYSLYSRERYICNSGFKRKAGTSSLTECVLNKATNVAHWTTPSLKCIR

SEQ ID NO: 235 - DNA, 2025 bp, Artificial
  Ganitumab_IgG1_Heavy Chain_PVGLIG_IL15 [nc30-Sushi+]
caggtgcagctgcaggagtcgggaccaggactggtgaagccttcggggaccctgtccctcacctgcgctgtctctggtggctccatcagcagtagtaactggtggagttgggtccgccagcccccagggaaggggctggagtggattggggaaatctatcatagtgggagcaccaactacaacccgtccctcaagagtcgagtcaccatatcagtagacaagtccaagaaccagttctccctgaagctgagctctgtgaccgccgcggacacggccgtgtattactgtgcgagatggaccgggcgtactgatgcttttgatatctggggccaagggacaatggtcaccgtctcaagcgcgtccacaaagggcccaagcgtgttcccgctagcccccagcagcaagagcaccagcggcggcacagccgccctgggctgcctggtgaaggactacttccccgagcccgtgaccgtgtcctggaacagcggagccctgacctccggcgtgcacaccttccccgccgtgctgcagagcagcggcctgtacagcctgagcagcgtggtgaccgtgcccagcagcagcctgggcacccagacctacatctgtaacgtgaaccacaagcccagcaacaccaaggtggacaagagagtggagcccaagagctgtgacaagacccacacctgtcccccctgcccagcccccgagctgctgggcggacccagcgtgttcctgttcccccccaagcccaaggacaccctgatgatcagcagaacccccgaggtgacctgtgtggtggtggacgtgtcccacgaggacccagaggtgaagttcaactggtacgtggacggcgtggaggtgcacaacgccaagaccaagcccagagaggagcagtacaacagcacctacagggtggtgtccgtgctgaccgtgctgcaccaggactggctgaacggcaaggagtacaagtgtaaggtgtccaacaaggccctgccagccccaatcgaaaagaccatcagcaaggccaagggccagccaagagagccccaggtgtacaccctgccacccagcagggaggagatgaccaagaaccaggtgtccctgacctgtctggtgaagggcttctacccaagcgacatcgccgtggagtgggagagcaacggccagcccgagaacaactacaagaccacccccccagtgctggacagcgacggcagcttcttcctgtacagcaagctgaccgtggacaagagcagatggcagcagggcaacgtgttcagctgctccgtgatgcacgaggccctgcacaaccactacacccagaagagcctgagcctgtccccaggcccggtgggcctgattggcaactgggtgaatgtaataagtgatttgaaaaaaattgaagatcttattcaatctatgcatattgatgctactttatatacggaaagtgatgttcaccccagttgcaaagtaacagcaatgaagtgctttctcttggagttacaagttatttcacttgagtccggagatgcaagtattcatgatacagtagaaaatctgatcatcctagcaaacaacagtttgtcttctaatgggaatgtaacagaatctggatgcaaagaatgtgaggaactggaggaaaaaaatattaaagaatttttgcagagttttgtacatattgtccaaatgttcatcaacacttctggaggcggaggatctggtggtggtggatctggcggcggaggaagtggcggaggcggaagcggtggtggcggttcaggtggcggagctagcatcacctgtcctccacctatgagcgtggaacacgccgacatctgggtcaagagctacagcctgtacagcagagagcggtacatctgcaacagcggcttcaagagaaaggccggcacaagcagcctgaccgagtgtgtgctgaacaaggccacaaacgtggcccactggaccacacctagcctgaagtgcatcagagaccccgccctggtgcaccagcggcccgcccccccc

SEQ ID NO: 236 - protein, 675 aa, Artificial
  Ganitumab_IgG1_Heavy Chain_PVGLIG_IL15 [nc30-Sushi+]
QVQLQESGPGLVKPSGTLSLTCAVSGGSISSSNWWSWVRQPPGKGLEWIGEIYHSGSTNYNPSLKSRVTISVDKSKNQFSLKLSSVTAADTAVYYCARWTGRTDAFDIWGQGTMVTVSSASTKGPSVFPLAPSSKSTSGGTAALGCLVKDYFPEPVTVSWNSGALTSGVHTFPAVLQSSGLYSLSSVVTVPSSSLGTQTYICNVNHKPSNTKVDKRVEPKSCDKTHTCPPCPAPELLGGPSVFLFPPKPKDTLMISRTPEVTCVVVDVSHEDPEVKFNWYVDGVEVHNAKTKPREEQYNSTYRVVSVLTVLHQDWLNGKEYKCKVSNKALPAPIEKTISKAKGQPREPQVYTLPPSREEMTKNQVSLTCLVKGFYPSDIAVEWESNGQPENNYKTTPPVLDSDGSFFLYSKLTVDKSRWQQGNVFSCSVMHEALHNHYTQKSLSLSPGPVGLIGNWVNVISDLKKIEDLIQSMHIDATLYTESDVHPSCKVTAMKCFLLELQVISLESGDASIHDTVENLIILANNSLSSNGNVTESGCKECEELEEKNIKEFLQSFVHIVQMFINTSGGGGSGGGGSGGGGSGGGGSGGGGSGGGASITCPPPMSVEHADIWVKSYSLYSRERYICNSGFKRKAGTSSLTECVLNKATNVAHWTTPSLKCIRDPALVHQRPAPP

SEQ ID NO: 237 - DNA, 2016 bp, Artificial
  Ganitumab_IgG4_Heavy Chain_PVGLIG_IL15 [nc30-Sushi+]
caggtgcagctgcaggagtcgggaccaggactggtgaagccttcggggaccctgtccctcacctgcgctgtctctggtggctccatcagcagtagtaactggtggagttgggtccgccagcccccagggaaggggctggagtggattggggaaatctatcatagtgggagcaccaactacaacccgtccctcaagagtcgagtcaccatatcagtagacaagtccaagaaccagttctccctgaagctgagctctgtgaccgccgcggacacggccgtgtattactgtgcgagatggaccgggcgtactgatgcttttgatatctggggccaagggacaatggtcaccgtctcaagcgcgtccacaaagggccccagcgtgttccctctggccccctgcagcagaagcaccagcgagtctacagccgccctgggatgcctggtcaaggactacttccccgagcccgtgaccgtgtcctggaactctggcgccctgaccagcggcgtgcacacctttccagccgtgctgcagagcagcggcctgtacagcctgagcagcgtcgtgaccgtgcctagcagcagcctgggcaccaagacctacacctgtaacgtggaccacaagcccagcaacaccaaggtggacaagcgggtggaatctaagtacggccctccctgccccccctgcccagcccctgaatttctgggcggaccctccgtgttcctgttccccccaaagcccaaggacaccctgatgatcagccggacccccgaagtgacctgcgtggtggtggacgtgtcccaggaagatcccgaggtccagttcaactggtacgtggacggcgtggaagtgcacaacgccaagaccaagcccagagaggaacagttcaacagcacctaccgggtggtgtccgtgctgaccgtgctgcaccaggactggctgaacggcaaagagtacaagtgcaaggtctccaacaagggcctgcccagctccatcgagaaaaccatcagcaaggccaagggccagccccgcgagccccaggtgtacacactgccccccagccaggaagagatgaccaagaaccaggtgtccctgacctgcctcgtgaagggcttctaccccagcgatatcgccgtggaatgggagagcaacggccagcccgagaacaactacaagaccaccccccctgtgctggacagcgacggcagcttcttcctgtactcccggctgaccgtcgacaagagccggtggcaggaaggcaacgtcttcagctgcagcgtgatgcacgaggccctgcacaaccactacacccagaagtccctgagcctgagcctgggaccggtgggcctgattggcaactgggtgaatgtaataagtgatttgaaaaaaattgaagatcttattcaatctatgcatattgatgctactttatatacggaaagtgatgttcaccccagttgcaaagtaacagcaatgaagtgctttctcttggagttacaagttatttcacttgagtccggagatgcaagtattcatgatacagtagaaaatctgatcatcctagcaaacaacagtttgtcttctaatgggaatgtaacagaatctggatgcaaagaatgtgaggaactggaggaaaaaaatattaaagaatttttgcagagttttgtacatattgtccaaatgttcatcaacacttctggaggcggaggatctggtggtggtggatctggcggcggaggaagtggcggaggcggaagcggtggtggcggttcaggtggcggagctagcatcacctgtcctccacctatgagcgtggaacacgccgacatctgggtcaagagctacagcctgtacagcagagagcggtacatctgcaacagcggcttcaagagaaaggccggcacaagcagcctgaccgagtgtgtgctgaacaaggccacaaacgtggcccactggaccacacctagcctgaagtgcatcagagaccccgccctggtgcaccagcggcccgcccccccc

SEQ ID NO: 238 - protein, 672 aa, Artificial
  Ganitumab_IgG4_Heavy Chain_PVGLIG_IL15 [nc30-Sushi+]
QVQLQESGPGLVKPSGTLSLTCAVSGGSISSSNWWSWVRQPPGKGLEWIGEIYHSGSTNYNPSLKSRVTISVDKSKNQFSLKLSSVTAADTAVYYCARWTGRTDAFDIWGQGTMVTVSSASTKGPSVFPLAPCSRSTSESTAALGCLVKDYFPEPVTVSWNSGALTSGVHTFPAVLQSSGLYSLSSVVTVPSSSLGTKTYTCNVDHKPSNTKVDKRVESKYGPPCPPCPAPEFLGGPSVFLFPPKPKDTLMISRTPEVTCVVVDVSQEDPEVQFNWYVDGVEVHNAKTKPREEQFNSTYRVVSVLTVLHQDWLNGKEYKCKVSNKGLPSSIEKTISKAKGQPREPQVYTLPPSQEEMTKNQVSLTCLVKGFYPSDIAVEWESNGQPENNYKTTPPVLDSDGSFFLYSRLTVDKSRWQEGNVFSCSVMHEALHNHYTQKSLSLSLGPVGLIGNWVNVISDLKKIEDLIQSMHIDATLYTESDVHPSCKVTAMKCFLLELQVISLESGDASIHDTVENLIILANNSLSSNGNVTESGCKECEELEEKNIKEFLQSFVHIVQMFINTSGGGGSGGGGSGGGGSGGGGSGGGGSGGGASITCPPPMSVEHADIWVKSYSLYSRERYICNSGFKRKAGTSSLTECVLNKATNVAHWTTPSLKCIRDPALVHQRPAPP

SEQ ID NO: 239 - DNA, 2007 bp, Artificial
  Ganitumab_IgG1_Heavy Chain_PVGLIG_PVGLIG_IL15 [nc30-Sushi]
caggtgcagctgcaggagtcgggaccaggactggtgaagccttcggggaccctgtccctcacctgcgctgtctctggtggctccatcagcagtagtaactggtggagttgggtccgccagcccccagggaaggggctggagtggattggggaaatctatcatagtgggagcaccaactacaacccgtccctcaagagtcgagtcaccatatcagtagacaagtccaagaaccagttctccctgaagctgagctctgtgaccgccgcggacacggccgtgtattactgtgcgagatggaccgggcgtactgatgcttttgatatctggggccaagggacaatggtcaccgtctcaagcgcgtccacaaagggcccaagcgtgttcccgctagcccccagcagcaagagcaccagcggcggcacagccgccctgggctgcctggtgaaggactacttccccgagcccgtgaccgtgtcctggaacagcggagccctgacctccggcgtgcacaccttccccgccgtgctgcagagcagcggcctgtacagcctgagcagcgtggtgaccgtgcccagcagcagcctgggcacccagacctacatctgtaacgtgaaccacaagcccagcaacaccaaggtggacaagagagtggagcccaagagctgtgacaagacccacacctgtcccccctgcccagcccccgagctgctgggcggacccagcgtgttcctgttcccccccaagcccaaggacaccctgatgatcagcagaacccccgaggtgacctgtgtggtggtggacgtgtcccacgaggacccagaggtgaagttcaactggtacgtggacggcgtggaggtgcacaacgccaagaccaagcccagagaggagcagtacaacagcacctacagggtggtgtccgtgctgaccgtgctgcaccaggactggctgaacggcaaggagtacaagtgtaaggtgtccaacaaggccctgccagccccaatcgaaaagaccatcagcaaggccaagggccagccaagagagccccaggtgtacaccctgccacccagcagggaggagatgaccaagaaccaggtgtccctgacctgtctggtgaagggcttctacccaagcgacatcgccgtggagtgggagagcaacggccagcccgagaacaactacaagaccacccccccagtgctggacagcgacggcagcttcttcctgtacagcaagctgaccgtggacaagagcagatggcagcagggcaacgtgttcagctgctccgtgatgcacgaggccctgcacaaccactacacccagaagagcctgagcctgtccccaggccctgtcggactcatcggaccggtgggcctgattggcaactgggtgaatgtaataagtgatttgaaaaaaattgaagatcttattcaatctatgcatattgatgctactttatatacggaaagtgatgttcaccccagttgcaaagtaacagcaatgaagtgctttctcttggagttacaagttatttcacttgagtccggagatgcaagtattcatgatacagtagaaaatctgatcatcctagcaaacaacagtttgtcttctaatgggaatgtaacagaatctggatgcaaagaatgtgaggaactggaggaaaaaaatattaaagaatttttgcagagttttgtacatattgtccaaatgttcatcaacacttctggaggcggaggatctggtggtggtggatctggcggcggaggaagtggcggaggcggaagcggtggtggcggttcaggtggcggagctagcatcacctgtcctccacctatgagcgtggaacacgccgacatctgggtcaagagctacagcctgtacagcagagagcggtacatctgcaacagcggcttcaagagaaaggccggcacaagcagcctgaccgagtgtgtgctgaacaaggccacaaacgtggcccactggaccacacctagcctgaagtgcatcaga

SEQ ID NO: 240 - protein, 669 aa, Artificial
  Ganitumab_IgG1_Heavy Chain_PVGLIG_PVGLIG_IL15 [nc30-Sushi]
QVQLQESGPGLVKPSGTLSLTCAVSGGSISSSNWWSWVRQPPGKGLEWIGEIYHSGSTNYNPSLKSRVTISVDKSKNQFSLKLSSVTAADTAVYYCARWTGRTDAFDIWGQGTMVTVSSASTKGPSVFPLAPSSKSTSGGTAALGCLVKDYFPEPVTVSWNSGALTSGVHTFPAVLQSSGLYSLSSVVTVPSSSLGTQTYICNVNHKPSNTKVDKRVEPKSCDKTHTCPPCPAPELLGGPSVFLFPPKPKDTLMISRTPEVTCVVVDVSHEDPEVKFNWYVDGVEVHNAKTKPREEQYNSTYRVVSVLTVLHQDWLNGKEYKCKVSNKALPAPIEKTISKAKGQPREPQVYTLPPSREEMTKNQVSLTCLVKGFYPSDIAVEWESNGQPENNYKTTPPVLDSDGSFFLYSKLTVDKSRWQQGNVFSCSVMHEALHNHYTQKSLSLSPGPVGLIGPVGLIGNWVNVISDLKKIEDLIQSMHIDATLYTESDVHPSCKVTAMKCFLLELQVISLESGDASIHDTVENLIILANNSLSSNGNVTESGCKECEELEEKNIKEFLQSFVHIVQMFINTSGGGGSGGGGSGGGGSGGGGSGGGGSGGGASITCPPPMSVEHADIWVKSYSLYSRERYICNSGFKRKAGTSSLTECVLNKATNVAHWTTPSLKCIR

SEQ ID NO: 241 - DNA, 2043 bp, Artificial
  Ganitumab_IgG1_Heavy Chain_PVGLIG_PVGLIG_IL15 [nc30-Sushi+]
caggtgcagctgcaggagtcgggaccaggactggtgaagccttcggggaccctgtccctcacctgcgctgtctctggtggctccatcagcagtagtaactggtggagttgggtccgccagcccccagggaaggggctggagtggattggggaaatctatcatagtgggagcaccaactacaacccgtccctcaagagtcgagtcaccatatcagtagacaagtccaagaaccagttctccctgaagctgagctctgtgaccgccgcggacacggccgtgtattactgtgcgagatggaccgggcgtactgatgcttttgatatctggggccaagggacaatggtcaccgtctcaagcgcgtccacaaagggcccaagcgtgttcccgctagcccccagcagcaagagcaccagcggcggcacagccgccctgggctgcctggtgaaggactacttccccgagcccgtgaccgtgtcctggaacagcggagccctgacctccggcgtgcacaccttccccgccgtgctgcagagcagcggcctgtacagcctgagcagcgtggtgaccgtgcccagcagcagcctgggcacccagacctacatctgtaacgtgaaccacaagcccagcaacaccaaggtggacaagagagtggagcccaagagctgtgacaagacccacacctgtcccccctgcccagcccccgagctgctgggcggacccagcgtgttcctgttcccccccaagcccaaggacaccctgatgatcagcagaacccccgaggtgacctgtgtggtggtggacgtgtcccacgaggacccagaggtgaagttcaactggtacgtggacggcgtggaggtgcacaacgccaagaccaagcccagagaggagcagtacaacagcacctacagggtggtgtccgtgctgaccgtgctgcaccaggactggctgaacggcaaggagtacaagtgtaaggtgtccaacaaggccctgccagccccaatcgaaaagaccatcagcaaggccaagggccagccaagagagccccaggtgtacaccctgccacccagcagggaggagatgaccaagaaccaggtgtccctgacctgtctggtgaagggcttctacccaagcgacatcgccgtggagtgggagagcaacggccagcccgagaacaactacaagaccacccccccagtgctggacagcgacggcagcttcttcctgtacagcaagctgaccgtggacaagagcagatggcagcagggcaacgtgttcagctgctccgtgatgcacgaggccctgcacaaccactacacccagaagagcctgagcctgtccccaggccctgtcggactcatcggaccggtgggcctgattggcaactgggtgaatgtaataagtgatttgaaaaaaattgaagatcttattcaatctatgcatattgatgctactttatatacggaaagtgatgttcaccccagttgcaaagtaacagcaatgaagtgctttctcttggagttacaagttatttcacttgagtccggagatgcaagtattcatgatacagtagaaaatctgatcatcctagcaaacaacagtttgtcttctaatgggaatgtaacagaatctggatgcaaagaatgtgaggaactggaggaaaaaaatattaaagaatttttgcagagttttgtacatattgtccaaatgttcatcaacacttctggaggcggaggatctggtggtggtggatctggcggcggaggaagtggcggaggcggaagcggtggtggcggttcaggtggcggagctagcatcacctgtcctccacctatgagcgtggaacacgccgacatctgggtcaagagctacagcctgtacagcagagagcggtacatctgcaacagcggcttcaagagaaaggccggcacaagcagcctgaccgagtgtgtgctgaacaaggccacaaacgtggcccactggaccacacctagcctgaagtgcatcagagaccccgccctggtgcaccagcggcccgcccccccc

SEQ ID NO: 242 - protein, 681 aa, Artificial
  Ganitumab_IgG1_Heavy Chain_PVGLIG_PVGLIG_IL15 [nc30-Sushi+]
QVQLQESGPGLVKPSGTLSLTCAVSGGSISSSNWWSWVRQPPGKGLEWIGEIYHSGSTNYNPSLKSRVTISVDKSKNQFSLKLSSVTAADTAVYYCARWTGRTDAFDIWGQGTMVTVSSASTKGPSVFPLAPSSKSTSGGTAALGCLVKDYFPEPVTVSWNSGALTSGVHTFPAVLQSSGLYSLSSVVTVPSSSLGTQTYICNVNHKPSNTKVDKRVEPKSCDKTHTCPPCPAPELLGGPSVFLFPPKPKDTLMISRTPEVTCVVVDVSHEDPEVKFNWYVDGVEVHNAKTKPREEQYNSTYRVVSVLTVLHQDWLNGKEYKCKVSNKALPAPIEKTISKAKGQPREPQVYTLPPSREEMTKNQVSLTCLVKGFYPSDIAVEWESNGQPENNYKTTPPVLDSDGSFFLYSKLTVDKSRWQQGNVFSCSVMHEALHNHYTQKSLSLSPGPVGLIGPVGLIGNWVNVISDLKKIEDLIQSMHIDATLYTESDVHPSCKVTAMKCFLLELQVISLESGDASIHDTVENLIILANNSLSSNGNVTESGCKECEELEEKNIKEFLQSFVHIVQMFINTSGGGGSGGGGSGGGGSGGGGSGGGGSGGGASITCPPPMSVEHADIWVKSYSLYSRERYICNSGFKRKAGTSSLTECVLNKATNVAHWTTPSLKCIRDPALVHQRPAPP

SEQ ID NO: 243 - protein, 9 aa, Artificial
  linker
PSSSRRRVN

SEQ ID NO: 244 - protein, 20 aa, Mus musculus
METDTLLLWVLLLWVPGSTG
